(19) United States
(12) Patent Application Publication
(10) Pub. No.: US 2021/0054077 A1
(43) Pub. Date: Feb. 25, 2021

(54) CD3 ANTIGEN BINDING FRAGMENTS AND COMPOSITIONS COMPRISING SAME

(71) Applicant: Amunix Pharmaceuticals, Inc., Mountain View, CA (US)

(72) Inventors: Volker Schellenberger, Palo Alto, CA (US); Philipp Kuhn, Bremen (DE); André Frenzel, Braunschweig (DE); Darragh MacCann, Magherafelt (GB); James McClory, Ballynaskeagh Banbridge (GB)

(21) Appl. No.: 16/996,899

(22) Filed: Aug. 19, 2020

Related U.S. Application Data
(63) Continuation-in-part of application No. PCT/US2020/039673, filed on Jun. 25, 2020.
(60) Provisional application No. 63/041,059, filed on Jun. 18, 2020.
(60) Provisional application No. 62/866,746, filed on Jun. 26, 2019.

(51) Int. Cl. C07K 16/28

(52) U.S. Cl. CPC C07K 16/2809; C07K 2317/92; C07K 2317/31; C07K 2317/567; C07K 2317/94; C07K 2317/565

(57) ABSTRACT

This disclosure relates to compositions having an antibody binding fragment that specifically binds to CD3 or an epitope thereof. Some embodiments include compositions and antibody binding fragments with increased stability. Bispecific fusion proteins including such antibody-binding fragments are also disclosed.

### CROSS-REFERENCE STATEMENT

[0001] This application is a continuation-in-part application claiming the benefit of International Patent Application No. PCT/US2020/039673, entitled “CD3 ANTIGEN BINDING FRAGMENTS AND COMPOSITIONS COMPRISING SAME,” filed on Jun. 25, 2020, which claims the benefit of U.S. Provisional Application No. 62/866,746, entitled “CD3 ANTIGEN BINDING FRAGMENTS AND COMPOSITIONS COMPRISING SAME”, filed on Jun. 26, 2019, and U.S. Provisional Application No. 63/041,059, entitled “CD3 ANTIGEN BINDING FRAGMENTS AND COMPOSITIONS COMPRISING SAME”, filed on Jun. 18, 2020, all of which are incorporated herein in their entireties for all purposes.

### SEQUENCE LISTING

[0002] The instant application contains a Sequence Listing which has been submitted electronically in ASCII format and is hereby incorporated by reference in its entirety. Said ASCII copy, created on Jun. 24, 2020, is named 32808-775_601_SL.txt and is 3,106,733 bytes in size.

### BACKGROUND

[0003] Many approved cancer therapeutics are cytotoxic drugs that kill normal cells as well as tumor cells. The therapeutic benefit of these cytotoxic drugs depends on tumor cells being more sensitive than normal cells, thereby allowing clinical responses to be achieved using doses that do not result in unacceptable side effects. However, essentially all of these non-specific drugs result in some if not severe damage to normal tissues, which often limits treatment suitability.

[0004] Bispecific antibodies can offer a different approach to cytotoxic drugs by directing immune effector cells to kill cancer cells. Bispecific antibodies combine the benefits of different binding specificities derived from two monoclonal antibodies into a single composition, enabling approaches or combinations of coverages that are not possible with monospecific antibodies. In one embodiment, this approach relies on binding of one arm of the bispecific antibody to a tumor-associated antigen or marker, while the other arm, upon binding the CD3 molecule on T cells, triggers their cytotoxic activity by the release of effector molecules such as such as TNF-α, IFN-γ, interleukins 2, 4 and 10, perforin, and granzymes. Advances in antibody engineering have led to the development of a number of bispecific antibody formats and compositions for redirecting effector cells to tumor targets, including bispecifics that function by recruiting and activating polyclonal populations of T cells at tumor sites, and do so without the need for co-stimulation or conventional MHC recognition. There remains, however, the dual problems of certain patients experiencing serious side effects referred to as “cytokine storm” or “cytokine release syndrome” (Lee D W et al. Current concepts in the diagnosis and management of cytokine release syndrome. Blood. 2014 124(2):188-195) mediated by the release of TNF-α and IFN-γ, amongst other cytokines, in addition to the fact that some bispecific compositions have a very short half-life, necessitating continuous infusions of four to eight weeks in order to maintain circulating concentrations within the therapeutic window for sufficient time to achieve a therapeutic effect, or have a variable effect. Thus, there is an unmet need in the field for the development of effective bispecific antibodies for use in cancer treatment.

### SUMMARY

[0005] The present invention relates to anti-cluster of differentiation 3 (CD3) antigen binding fragments incorporated into chimeric fusion proteins and methods of using the same.

[0006] In one aspect, disclosed herein is a polypeptide comprising an antigen binding fragment, wherein the antigen binding fragment, comprises light chain complementarity-determining regions (CDR-L) and heavy chain complementarity-determining regions (CDR-H), and wherein the antigen binding fragment, a. specifically binds to cluster of differentiation 3 T cell receptor (CD3); and b. comprises CDR-H1, CDR-H2, and CDR-H3, having amino acid sequences of SEQ ID NOs: 8, 9, and 10, respectively.

[0007] In another aspect, disclosed herein is a polypeptide comprising an anti-CD3 antigen binding fragment, wherein the antigen binding fragment comprises light chain complementarity-determining regions (CDR-L) and heavy chain complementarity-determining regions (CDR-H), and wherein the antigen binding fragment a. specifically binds to CD3; b. comprises CDR-H1, CDR-H2, and CDR-H3, wherein CDR-H3 comprises an amino acid sequence of SEQ ID NO:10; and c. exhibits a higher thermal stability, as evidenced by in an in vitro assay, (i) a higher melting temperature (Tₘ) relative to that of an antigen binding fragment consisting of a sequence shown in SEQ ID NO:41, or (ii) upon incorporating said anti-CD3 antigen binding fragment into an anti-CD3 bispecific antibody, the bispecific antibody exhibits a higher Tm relative to a control bispecific antibody, wherein said anti-CD3 bispecific antibody comprises said anti-CD3 binding fragment and a reference antigen binding fragment that binds to an antigen other than CD3, and wherein said control bispecific antigen binding fragment consists of SEQ ID NO:41 and said reference antigen binding fragment.

[0008] In some embodiments, the Tₘ of the antigen binding fragment is at least 2° C. greater, or at least 3° C. greater, or at least 4° C. greater, or at least 5° C. greater than the Tₘ of an antigen binding fragment consisting of a sequence of SEQ ID NO:41.

[0009] In yet another aspect, disclosed herein is a polypeptide comprising an antigen binding fragment, wherein the antigen binding fragment comprises light chain complementarity-determining regions (CDR-L) and heavy chain complementarity-determining regions (CDR-H), wherein the antigen binding fragment a. specifically binds to CD3; b. comprises CDR-H1, CDR-H2, and CDR-H3, wherein CDR-H3 comprises an amino acid sequence of SEQ ID NO:10; and c. comprises FR-H1, FR-H2, FR-H3, FR-H4, each exhibiting at least 86%, 87%, 88%, 89%, 90%, 91%, 92%, 93%, 94%, 95%, 96%, 97%, 98%, 99% sequence identity or is identical to an amino acid of SEQ ID NOs: 22, 23, 25, and 26, respectively. In some embodiments, the antigen binding fragment disclosed herein is a chimeric or a humanized antigen binding fragment. In other embodiments, the antigen binding fragment is selected from the group consisting of Fv, Fab, Fab′, Fab′-SH, linear antibody, and single-chain variable fragment (scFv).

[0010] In some embodiments, the CDR-H1 and the CDR-H2 comprise amino acid sequences of SEQ ID NOs: 8 and 9, respectively. In certain embodiments, the CDR-L comprises: a CDR-L1 having an amino acid sequence of SEQ ID NOs: 1 or 2, a CDR-L2 having an amino acid sequence of SEQ ID NOs: 4 or 5, and a CDR-L3 having an amino acid sequence of SEQ ID NO:6. In another embodiment, the CDR-L comprises: a CDR-L1 having an amino acid sequence of SEQ ID NO:1; a CDR-L2 having an amino acid sequence of any one of SEQ ID NOs: 4 or 5; and a CDR-L3 having an amino acid sequence of SEQ ID NOs: 6 or 7. In yet another embodiment, the CDR-L comprises: a CDR-L1 having an amino acid sequence of SEQ ID NO:2; a CDR-L2 having an amino acid sequence of any one of SEQ ID NOS: 4 or 5; and a CDR-L3 having an amino acid sequence of SEQ ID NO:6. In one embodiment, the CDR-L comprises: a CDR-L1 having an amino acid sequence of SEQ ID NO: 1; a CDR-L2 having an amino acid sequence of SEQ ID NO: 4; a CDR-L3 having an amino acid sequence of SEQ ID NO: 6. In certain embodiments, the CDR-L comprises: a CDR-L1 having an amino acid sequence of SEQ ID NO:2; a CDR-L2 having an amino acid sequence of SEQ ID NO:5; and a CDR-L3 having an amino acid sequence of SEQ ID NO:6.

[0011] In certain embodiments, the antigen binding fragment further comprises FR-L1, FR-L2, FR-L3, FR-L4, each exhibiting at least 86%, 87%, 88%, 89%, 90%, 91%, 92%, 93%, 94%, 95%, 96%, 97%, 98%, 99% sequence identity or is identical to amino acid sequences of SEQ ID NOs: 12, 13, 18, and 19, respectively.

[0012] In other embodiments, the antigen binding fragment further comprises a light chain framework region (FR-L) and a heavy chain framework region (FR-H), and wherein the antigen binding fragment comprises: a. a FR-L1 having an amino acid sequence of SEQ ID NO:12; b. a FR-L2 having an amino acid sequence of SEQ ID NO:13; c. a FR-L3 having an amino acid sequence of any one of SEQ ID NOs:14-17; d. a FR-L4 having an amino acid sequence of SEQ ID NO:19; e. a FR-H1 having an amino acid sequence of SEQ ID NO:20 or SEQ ID NO:21; f a FR-H2 having an amino acid sequence of SEQ ID NO:23; e. a FR-H3 having an amino acid sequence of SEQ ID NO:24; and f. a FR-H4 having an amino acid sequence of any one of SEQ ID NO:26. In other embodiments, the antigen binding fragment comprises: a. a FR-L1 having an amino acid sequence of SEQ ID NO:12; b. a FR-L2 having an amino acid sequence of SEQ ID NO:13; c. a FR-L3 having an amino acid sequence of SEQ ID NO:14; d. a FR-L4 having an amino acid sequence of SEQ ID NO:19; e. a FR-H1 having an amino acid sequence of SEQ ID NO:20; f. a FR-H2 having an amino acid sequence of SEQ ID NO:23; g. a FR-H3 having an amino acid sequence of SEQ ID NO:24; and h. a FR-H4 having an amino acid sequence of SEQ ID NO:26. In another embodiment, the antigen binding fragment comprises: a. a FR-L1 having an amino acid sequence of SEQ ID NO:12; b. a FR-L2 having an amino acid sequence of SEQ ID NO:13; c. a FR-L3 having an amino acid sequence of SEQ ID NO:15; d. a FR-L4 having an amino acid sequence of SEQ ID NO:19; e. a FR-H1 having an amino acid sequence of SEQ ID NO:21; f. a FR-H2 having an amino acid sequence of SEQ ID NO:23; g. a FR-H3 having an amino acid sequence of SEQ ID NO:24; and h. a FR-H4 having an amino acid sequence of SEQ ID NO:26. In another embodiment, the antigen binding fragment comprises: a. a FR-L1 having an amino acid sequence of SEQ ID NO:12; b. a FR-L2 having an amino acid sequence of SEQ ID NO:13; c. a FR-L3 having an amino acid sequence of SEQ ID NO:16; d. a FR-L4 having an amino acid sequence of SEQ ID NO:19; e. a FR-H1 having an amino acid sequence of SEQ ID NO:21; f. a FR-H2 having an amino acid sequence of SEQ ID NO:23; g. a FR-H3 having an amino acid sequence of SEQ ID NO:24; and h. a FR-H4 having an amino acid sequence of SEQ ID NO:26. In certain embodiments, the antigen binding fragment comprises: a. a FR-L1 having an amino acid sequence of SEQ ID NO:12; b. a FR-L2 having an amino acid sequence of SEQ ID NO:13; c. a FR-L3 having an amino acid sequence of SEQ ID NO:17; d. a FR-L4 having an amino acid sequence of SEQ ID NO:19; e. a FR-H1 having an amino acid sequence of SEQ ID NO:21; f. a FR-H2 having an amino acid sequence of SEQ ID NO:23; g. a FR-H3 having an amino acid sequence of SEQ ID NO:24; and h. a FR-H4 having an amino acid sequence of SEQ ID NO:26.

[0013] In some embodiments, the antigen binding fragment comprises a variable heavy (VH) amino acid sequence having at least 90%, 91%, 92%, 93%, 94%, 95%, 96%, 97%, 98%, 99% sequence identity or is identical to an amino acid sequence of SEQ ID NO:28 or SEQ ID NO:31. In certain embodiments, the antigen binding fragment comprises a variable light (VL) amino acid sequence having at least 90%, 91%, 92%, 93%, 94%, 95%, 96%, 97%, 98%, 99% sequence identity or is identical to an amino acid sequence of any one of SEQ ID NOs: 27, 29, 30, 32, or 33. In other embodiments, the antigen binding fragment comprises an amino acid sequence having at least 95%, 96%, 97%, 98%, 99% sequence identity or is identical to an amino acid sequence of any one of SEQ ID NOs: 36-40.

[0014] In some embodiments, the antigen binding fragment specifically binds human or cynomolgus monkey (cyno) CD3. In other embodiments, the antigen binding fragment specifically binds human and cynomolgus monkey (cyno) CD3. In certain embodiments, the antigen binding fragment binds a CD3 complex subunit selected from CD3 epsilon, CD3 delta, CD3 gamma, CD3 zeta, CD3 alpha and CD3 beta epsilon unit of CD3. In other embodiments, the antigen binding fragment binds a CD3 epsilon fragment of CD3.

[0015] In certain embodiments, the antigen binding fragment specifically binds human or cyno CD3 with a dissociation constant (K_{d}) constant between about between about 10 nM and about 400 nM, as determined in an in vitro antigen-binding assay comprising a human or cyno CD3 antigen. In other embodiments, the antigen binding fragment specifically binds human or cyno CD3 with a dissociation constant (K_{d}) of less than about 10 nM, or less than about 50 nM, or less than about 100 nM, or less than about 150 nM, or less than about 200 nM, or less than about 250 nM, or less than about 300 nM, or less than about 350 nM, or less than about 400 nM as determined in an in vitro antigen-binding assay. In another embodiment, the antigen binding fragment exhibits a binding affinity to CD3 that is at least 2-fold, 3-fold, 4-fold, 5-fold, 6-fold, 7-fold, 8-fold, 9-fold, or at least 10-fold weaker relative to that of an antigen binding fragment consisting of an amino acid sequence of SEQ ID NO:41, as determined by the respective dissociation constants (K_{d}) in an in vitro antigen-binding assay.

[0016] In some embodiments, the antigen binding fragment exhibits an isoelectric point (pI) that is less than or equal to 6.6. In other embodiments, the antigen binding fragment exhibits a pI that is between 6.0 and 6.6, inclusive. In certain embodiments, the antigen binding fragment exhibits a pI that is at least 0.1, 0.2, 0.3, 0.4, 0.5, 0.6, 0.7, 0.8, 0.9, or 1.0 pH units lower than the pI of a reference antigen binding fragment consisting of a sequence shown in SEQ ID NO: 41.

[0017] In other embodiments, the polypeptide disclosed herein, further comprises a first release segment peptide (RS1), wherein the RS1 is a substrate for cleavage by a mammalian protease. In certain embodiments, the RS1 is a substrate for a protease selected from the group consisting of legumain, MMP-2, MMP-7, MMP-9, MMP-11, MMP-14, uPA, and matriptase. In another embodiment, the RS1 comprises an amino acid sequence having at least 90%, 91%, 92%, 93%, 94%, 95%, 96%, 97%, 98%, 99%, or 100% sequence identity to a sequence selected from SEQ ID NOs: 42-660. In certain embodiments, the RS1 comprises an amino acid sequence selected from the sequences of RSR-2089, RSR-2295, RSR-2298, RSR-2488, RSR-2599, RSR-2485, RSR-2486, RSR-2728, RSN-2089, RSN-2295, RSN-2298, RSN-2488, RSN-2599, RSN-2485, RSN-2486, RSN-2728, RSC-2089, RSC-2295, RSC-2298, RSC-2488, RSC-2599, RSC-2485, RSC-2486, and RSC-2728, each of which being forth in Table 5.

[0018] In some embodiments, the polypeptide disclosed herein further comprises a first extended recombinant polypeptide (XTEN1) wherein the XTEN1 is characterized in that a. it has at least about 36 amino acids or at least about 100 amino acids; b. at least 90%, 91%, 92%, 93%, 94%, 95%, 96%, 97%, 98%, 99% or 100% of the amino acid residues of the XTEN1 sequence are selected from glycine (G), alanine (A), serine (S), threonine (T), glutamate (E) and proline (P); and c. it has at least 4-6 different amino acids selected from G, A, S, T, E and P. In some embodiments, the XTEN1 have at least about 36 to about 1000 amino acids or at least about 100 to 1000 amino acids. In certain embodiments, the XTEN1 comprises an amino acid sequence selected from at least three of SEQ ID NOs: 661-664. In other embodiments, the XTEN1 comprises an amino acid sequence having at least about 90%, 91%, 92%, 93%, 94%, 95%, 96%, 97%, 98%, 99%, or 100% sequence identity to a sequence selected from SEQ ID NOs: 665-718 and 922-926. In another embodiment, the XTEN1 comprises an amino acid sequence having at least about 90%, 91%, 92%, 93%, 94%, 95%, 96%, 97%, 98%, 99%, or 100% sequence identity to a sequence selected from the sequences of AE144_1A, AE144_2A, AE144_2B, AE144_3A, AE144_3B, AE144_4A, AE144_4B, AE144_5A, AE144_6B, AE144_7A, AE284, AE288_1, AE288_2, AE288_3, AE292, AE293, AE300, AE576, AE584, AE864, AE864_2, AE865, AE866, AE867, and AE868, each of which being set forth in Table 7.

[0019] In certain embodiments, the polypeptide disclosed herein is expressed as a fusion protein, wherein the fusion protein, in an uncleaved state, has a structural arrangement from N-terminus to C-terminus of AF1-RS1-XTEN1 or XTEN1-RS1-AF1, wherein AF1 is a first antigen binding fragment.

[0020] In certain aspect, disclosed herein is a polypeptide comprising an RS1, RS2, AF1, AF2, XTEN1, and XTEN2, wherein: a. the RS1 and RS2 are each a substrate for cleavage by a mammalian protease and each comprise an amino acid sequence having at least 90%, 91%, 92%, 93%, 94%, 95%, 96%, 97%, 98%, 99%, or 100% sequence identity to a sequence selected from SEQ ID NOs:42-660; b. the AF1 is an antigen binding fragment of a monoclonal antibody having binding specificity to CD3; c. the AF2 is an antigen binding fragment comprising a VL and VH of a monoclonal antibody having binding affinity to a target cell marker; d. the XTEN1 comprises an amino acid sequence having at least about 90%, 91%, 92%, 93%, 94%, 95%, 96%, 97%, 98%, 99%, or 100% sequence identity to a sequence selected from SEQ ID NOs: 665-718 and 922-926; e. the XTEN2 comprises an amino acid sequence having at least about 90%, 91%, 92%, 93%, 94%, 95%, 96%, 97%, 98%, 99%, or 100% sequence identity to a sequence selected from SEQ ID NOs: 665-718 and 922-926; f the polypeptide has a structural arrangement from N-terminus to C-terminus as follows: XTEN1-RS1-AF2-AF1-RS2-XTEN2, XTEN1-RS1-AF1-AF2-RS2-XTEN2, XTEN2-RS2-AF2-AF1-RS1-XTEN1, XTEN2-RS2-AF1-AF2-RS1-XTEN1, or XTEN2-RS2-diabody-RS1-XTEN1, wherein the diabody comprises VL and VH of the AF1 and AF2; and g. the polypeptide exhibits a higher thermal stability, as determined by an increase in melting temperature (Tm) in an in vitro assay, relative to an antibody fragment consisting of a sequence shown in SEQ ID NO:41.

[0021] In some embodiments, the AF1 comprises heavy chain complementary determining regions (CDR-H) CDR-H1, CDR-H2, and CDR-H3, wherein CDR-H3 comprises an amino acid sequence of SEQ ID NO:10; and exhibits a higher thermal stability, as determined by an increased melting temperature (Tₘ) in an in vitro assay, relative to that of an antigen binding fragment consisting of a sequence shown in SEQ ID NO:41. In other embodiments, the AF1 comprises light chain complementarity-determining regions (CDR-L) and heavy chain complementarity-determining regions (CDR-H), wherein the AF1 comprises CDR-H1, CDR-H2, and CDR-H3, wherein CDR-H3 comprises an amino acid sequence of SEQ ID NO:10; and comprises FR-H1, FR-H2, FR-H3, FR-H4, each exhibiting at least 86%, 87%, 88%, 89%, 90%, 91%, 92%, 93%, 94%, 95%, 96%, 97%, 98%, 99% sequence identity or is identical to an amino acid of SEQ ID NOs: 20 or 21, 23, 24, and 26, respectively.

[0022] In certain embodiments, the CDR-H1 and the CDR-H2 comprise amino acid sequences of SEQ ID NOs: 8 and 9, respectively. In some embodiments, the CDR-L comprises: a CDR-L1 having an amino acid sequence of SEQ ID NO: 1 or 2; a CDR-L2 having an amino acid sequence of SEQ ID NO: 4 or 5; and a CDR-L3 having an amino acid sequence of SEQ ID NO:6. In another embodiment, the CDR-L comprises: a CDR-L1 having an amino acid sequence of SEQ ID NO:1; a CDR-L2 having an amino acid sequence of any one of SEQ ID NOs: 4 or 5; and a CDR-L3 having an amino acid sequence of SEQ ID NO:6. In other embodiments, the CDR-L comprises: a CDR-L1 having an amino acid sequence of SEQ ID NO:2; a CDR-L2 having an amino acid sequence of any one of SEQ ID NOs: 4 or 5; and a CDR-L3 having an amino acid sequence of SEQ ID NO:6. In other embodiments, the CDR-L comprises: a CDR-L1 having an amino acid sequence of SEQ ID NO: 1; a CDR-L2 amino acid sequence of any one of SEQ ID NO: 4; and a CDR-L3 amino acid sequence of SEQ ID NO: 6. In other embodiments, the CDR-L comprises: a CDR-L1 having an amino acid sequence of SEQ ID NO:2; a CDR-L2 having an amino acid sequence of any one of SEQ ID NO:5; and a CDR-L3 having an amino acid sequence of SEQ ID NO:6.

[0023] In some embodiments, the AF1 comprises a light chain framework region (FR-L) and a heavy chain framework region (FR-H), and wherein the AF1 comprises: a. a FR-L1 having an amino acid sequence of SEQ ID NO:12; b. a FR-L2 having an amino acid sequence of SEQ ID NO:13; c. a FR-L3 having an amino acid sequence of SEQ ID NO:14; d. a FR-L4 having an amino acid sequence of SEQ ID NO:19; e. a FR-H1 having an amino acid sequence of SEQ ID NO:20; f. a FR-H2 having an amino acid sequence of SEQ ID NO:23; g. a FR-H3 having an amino acid sequence of SEQ ID NO:24; and h. a FR-H4 having an amino acid sequence of SEQ ID NO:26. In one embodiment, the AF1 comprises: a. a FR-L1 having an amino acid sequence of SEQ ID NO:12; b. a FR-L2 having an amino acid sequence of SEQ ID NO:13; c. a FR-L3 having an amino acid sequence of SEQ ID NO:15; d. a FR-L4 having an amino acid sequence of SEQ ID NO:19; e. a FR-H1 having an amino acid sequence of SEQ ID NO:21; f. a FR-H2 having an amino acid sequence of SEQ ID NO:23; g. a FR-H3 having an amino acid sequence of SEQ ID NO:24; and h. a FR-H4 having an amino acid sequence of SEQ ID NO:26. In another embodiment, the AF1 comprises: a. a FR-L1 having an amino acid sequence of SEQ ID NO:12; b. a FR-L2 having an amino acid sequence of SEQ ID NO:13; c. a FR-L3 having an amino acid sequence of SEQ ID NO:16; d. a FR-L4 having an amino acid sequence of SEQ ID NO:19; e. a FR-H1 having an amino acid sequence of SEQ ID NO:21; f a FR-H2 having an amino acid sequence of SEQ ID NO:23; g. a FR-H3 having an amino acid sequence of SEQ ID NO:24; and h. a FR-H4 having an amino acid sequence of SEQ ID NO:26. In yet another embodiment, the AF1 comprises: a. a FR-L1 having an amino acid sequence of SEQ ID NO: 12; b. a FR-L2 having an amino acid sequence of SEQ ID NO:13; c. a FR-L3 having an amino acid sequence of SEQ ID NO:17; d. a FR-L4 having an amino acid sequence of SEQ ID NO:19; e. a FR-H1 having an amino acid sequence of SEQ ID NO:21; f a FR-H2 having an amino acid sequence of SEQ ID NO:23; g. a FR-H3 having an amino acid sequence of SEQ ID NO:24; and h. a FR-H4 having an amino acid sequence of SEQ ID NO:26.

[0024] In some other embodiments, the AF1 further comprises FR-L1, FR-L2, FR-L3, FR-L4, each exhibiting at least 86%, 87%, 88%, 89%, 90%, 91%, 92%, 93%, 94%, 95%, 96%, 97%, 98%, 99% sequence identity or is identical to amino acid sequences of SEQ ID NOs: 12, 13, 14-17, and 19, respectively.

[0025] In some embodiments, the AF1 comprises a variable heavy (VH) amino acid sequence having at least 90%, 91%, 92%, 93%, 94%, 95%, 96%, 97%, 98%, 99% sequence identity or is identical to an amino acid sequence of SEQ ID NO:28 or SEQ ID NO:31. In certain embodiments, the AF1 comprises a variable light (VL) amino acid sequence having at least 90%, 91%, 92%, 93%, 94%, 95%, 96%, 97%, 98%, 99% sequence identity or is identical to an amino acid sequence of any one of SEQ ID NOs: 27, 29, 30, 32, or 33. In certain embodiments, the AF1 comprises an amino acid sequence having at least 95%, 96%, 97%, 98%, 99% sequence identity or is identical to an amino acid sequence of any one of SEQ ID NOs:36-40.

[0026] In certain embodiments, the AF1 specifically binds human or cynomolgus monkey (cyno) CD3. In some embodiments, the AF1 specifically binds human and cynomolgus monkey (cyno) CD3. In some other embodiments, the AF1 binds CD3 complex subunits selected from CD3 epsilon, CD3 delta, CD3 gamma, CD3 zeta, CD3 alpha and CD3 beta epsilon fragment of CD3. In another embodiment, the AF1 binds CD3 epsilon. In another embodiment, the AF1 specifically binds human or cyno CD3 with a dissociation constant (K_{d}) constant between about between about 10 nM and about 400 nM, as determined in an in vitro antigen-binding assay. In certain embodiments, the AF1 specifically binds human or cyno CD3 with a dissociation constant (K_{d}) of less than about 3 nM, or less than about 10 nM, or less than about 50 nM, or less than about 100 nM, or less than about 150 nM, or less than about 200 nM, or less than about 250 nM, or less than about 300 nM, as determined in an in vitro antigen-binding assay. In other embodiments, the AF1 specifically binds human or cyno CD3 with at least 2-fold, 3-fold, 4-fold, 5-fold, 6-fold, 7-fold, 8-fold, 9-fold, or at least 10-fold less binding affinity than an AF1 consisting of an amino acid sequence of SEQ ID NO: 41, as determined by the respective dissociation constants (K_{d}) in an in vitro antigen-binding assays.

[0027] In some embodiments, the Tₘ of the AF1 is at least 2° C. greater, or at least 3° C. greater, or at least 4° C. greater, or at least 5° C. greater, or at least 6° C. greater, or at least 7° C. greater, or at least 8° C. greater, or at least 9° C. greater, or at least 10° C. greater than the Tₘ of an antigen binding fragment consisting of a sequence of SEQ ID NO:41, as determined by an increase in melting temperature in an in vitro assay.

[0028] In other embodiments, AF1 exhibits an isoelectric point (pI) that is less than or equal to 6.6. In certain embodiments, the AF1 exhibits a pI that is between 6.0 and 6.6, inclusive. In other embodiments, the AF1 exhibits a pI that is at least 0.1, 0.2, 0.3, 0.4, 0.5, 0.6, 0.7, 0.8, 0.9, or 1.0 lower than the pI of a reference antigen binding fragment consisting of a sequence shown in SEQ ID NO: 41.

[0029] In another embodiment, the polypeptide disclosed herein, further comprises a second antigen binding fragment (AF2) that specifically binds to a target cell marker other than CD3. In some embodiments, the AF2 is fused to the AF1 by a flexible peptide linker. In other embodiments, the flexible linker comprises 2 or 3 types of amino acids selected from the group consisting of glycine, serine, and proline. In certain embodiments, (1) the AF2 fragment is selected from the group consisting of Fv, Fab, Fab′, Fab′-SH, linear antibody, a single domain antibody, and single-chain variable fragment (scFv), or (2) the AF1 and AF2 are configured as an (Fab′)2 or a single chain diabody.

[0030] In some embodiments, the CDR of the AF2 is selected from the sequences of SEQ ID NOs: 719-918. In certain embodiments, the AF2 comprises VL and VH of a monoclonal antibody having binding affinity to the target cell marker. In other embodiments, the VL is selected from the sequences of SEQ ID NOs:819-918, and the VH of the AF2 is selected from the sequences of SEQ ID NOs:719-818.

[0031] In some embodiments, the target cell marker is a tumor antigen. In some embodiments, the target cell marker is selected from 1-40-β-amyloid, 4-1BB, 5AC, 5T4, 707-AP, A kinase anchor protein 4 (AKAP-4), activin receptor type-2B (ACVR2B), activin receptor-like kinase 1 (ALK1), adenocarcinoma antigen, adipophilin, adrenoceptor β3 (ADRB3), AGS-22M6, α folate receptor, α-fetoprotein (AFP), AIM-2, anaplastic lymphoma kinase (ALK), androgen receptor, angiopoietin 2, angiopoietin 3, angiopoietin-binding cell surface receptor 2 (Tie 2), anthrax toxin, AOC3 (VAP-1), B cell maturation antigen (BCMA), B7-H3 (CD276), Bacillus anthracis anthrax, B-cell activating factor (BAFF), B-lymphoma cell, bone marrow stromal cell antigen 2 (BST2), Brother of the Regulator of Imprinted Sites (BORIS), C242 antigen, C5, CA-125, cancer antigen 125 (CA-125 or MUC16), Cancer/testis antigen 1 (NY-ESO-1), Cancer/testis antigen 2 (LAGE-1a), carbonic anhydrase 9 (CA-IX), Carcinoembryonic antigen (CEA), cardiac myosin, CCCTC-Binding Factor (CTCF), CCL11 (eotaxin-1), CCR4, CCR5, CCR6, CCR7, CCR8, CCR9, CD11, CD123, CD125, CD140a, CD147 (basigin), CD15, CD152, CD154 (CD40L), CD171, CD179a, CD18, CD19, CD2, CD20, CD200, CD22, CD221, CD23 (IgE receptor), CD24, CD25 (a chain of IL-2 receptor), CD27, CD274, CD28, CD3, CD3 ε, CD30, CD300 molecule-like family member f (CD300LF), CD319 (SLAMF7), CD33, CD37, CD38, CD4, CD40, CD40 ligand, CD41, CD44 v7, CD44 v8, CD44 v6, CD5, CD51, CD52, CD56, CD6, CD70, CD72, CD74, CD79A, CD79B, CD80, CD97, CEA-related antigen, CFD, ch4D5, chromosome X open reading frame 61 (CXORF61), claudin 18.2 (CLDN18.2), claudin 6 (CLDN6), Clostridium difficile, clumping factor A, CLCA2, colony stimulating factor 1 receptor (CSF1R), CSF2, CTLA-4, C-type lectin domain family 12 member A (CLEC12A), C-type lectin-like molecule-1 (CLL-1 or CLECL1), C-X-C chemokine receptor type 4, cyclin B1, cytochrome P4501B1 (CYP1B1), cyp-B, cytomegalovirus, cytomegalovirus glycoprotein B, dabigatran, DLL4, DPP4, DR5, E. coli shiga toxin type-1, E. coli shiga toxin type-2, ecto-ADP-ribosyltransferase 4 (ART4), EGF-like module-containing mucin-like hormone receptor-like 2 (EMR2), EGF-like-domain multiple 7 (EGFL7), elongation factor 2 mutated (ELF2M), endotoxin, Ephrin A2, Ephrin B2, ephrin type-A receptor 2, epidermal growth factor receptor (EGFR), epidermal growth factor receptor variant III (EGFRvIII), episialin, epithelial cell adhesion molecule (EpCAM), epithelial glycoprotein 2 (EGP-2), epithelial glycoprotein 40 (EGP-40), ERBB2, ERBB3, ERBB4, ERG (transmembrane protease, serine 2 (TMPRSS2) ETS fusion gene), Escherichia coli, ETS translocation-variant gene 6, located on chromosome 12p (ETV6-AML), F protein of respiratory syncytial virus, FAP, Fc fragment of IgA receptor (FCAR or CD89), Fc receptor-like 5 (FCRLS), fetal acetylcholine receptor, fibrin II β chain, fibroblast activation protein α (FAP), fibronectin extra domain-B, FGF-5, Fms-Like Tyrosine Kinase 3 (FLT3), folate binding protein (FBP), folate hydrolase, folate receptor 1, folate receptor α, folate receptor β, Fos-related antigen 1, Frizzled receptor, Fucosyl GM1, G250, G protein-coupled receptor 20 (GPR20), G protein-coupled receptor class C group 5, member D (GPRC5D), ganglioside G2 (GD2), GD3 ganglioside, glycoprotein 100 (gp100), glypican-3 (GPC3), GMCSF receptor α-chain, GPNMB, GnT-V, growth differentiation factor 8, GUCY2C, heat shock protein 70-2 mutated (mut hsp70-2), hemagglutinin, Hepatitis A virus cellular receptor 1 (HAVCR1), hepatitis B surface antigen, hepatitis B virus, HER1, HER2/neu, HER3, hexasaccharide portion of globoH glycoceramide (GloboH), HGF, HHGFR, high molecular weight-melanoma-associated antigen (HMW-MAA), histone complex, HIV-1, HLA-DR, HNGF, Hsp90, HST-2 (FGF6), human papilloma virus E6 (HPV E6), human papilloma virus E7 (HPV E7), human scatter factor receptor kinase, human Telomerase reverse transcriptase (hTERT), human TNF, ICAM-1 (CD54), iCE, IFN-α, IFN-0, IFN-γ, IgE, IgE Fc region, IGF-1, IGF-1 receptor, IGHE, IL-12, IL-13, IL-17, IL-17A, IL-17F, IL-1β, IL-20, IL-22, IL-23, IL-31, IL-31RA, IL-4, IL-5, IL-6, IL-6 receptor, IL-9, immunoglobulin lambda-like polypeptide 1 (IGLL1), influenza A hemagglutinin, insulin-like growth factor 1 receptor (IGF-I receptor), insulin-like growth factor 2 (ILGF2), integrin α4β7, integrin β2, integrin α2, integrin α4, integrin α5β1, integrin α7β7, integrin αIIbβ3, integrin αvβ3, interferon α/β receptor, interferon γ-induced protein, Interleukin 11 receptor α (IL-11Rα), Interleukin-13 receptor subunit α-2 (IL-13Ra2 or CD213A2), intestinal carboxyl esterase, kinase domain region (KDR), KIR2D, KIT (CD117), L1-cell adhesion molecule (L1-CAM), legumain, leukocyte immunoglobulin-like receptor subfamily A member 2 (LILRA2), leukocyte-associated immunoglobulin-like receptor 1 (LAIR1), lymphocyte antigen 6 (Ly-6), Lewis-Y antigen, LFA-1 (CD11a), LINGO-1, lipoteichoic acid, LOXL2, L-selectin (CD62L), lymphocyte antigen 6 complex, locus K 9 (LY6K), lymphocyte antigen 75 (LY75), lymphocyte-specific protein tyrosine kinase (LCK), lymphotoxin-α (LT-α) or Tumor necrosis factor-β (TNF-β), Lysosomal Associated Membrane Protein 1 (LAMP1), macrophage migration inhibitory factor (MIF or MMIF), M-CSF, mammary gland differentiation antigen (NY-BR-1), MCP-1, melanoma cancer testis antigen-1 (MAD-CT-1), melanoma cancer testis antigen-2 (MAD-CT-2), melanoma inhibitor of apoptosis (ML-IAP), melanoma-associated antigen 1 (MAGE-A1), mesothelin, mucin 1, cell surface associated (MUC1), MUC-2, MUC3, MUC4, MUC5AC, MUC5B, MUC7, MUC16, mucin CanAg, myelin-associated glycoprotein, myostatin, N-Acetyl glucosaminyl-transferase V (NA17), NCA-90 (granulocyte antigen), Nectin-4, nerve growth factor (NGF), neural apoptosis-regulated proteinase 1, neural cell adhesion molecule (NCAM), neurite outgrowth inhibitor (e.g., NOGO-A, NOGO-B, NOGO-C), neuropilin-1 (NRP1), N-glycolylneuraminic acid, NKG2D, Notch receptor, o-acetyl-GD2 ganglioside (OAcGD2), olfactory receptor 51E2 (OR51E2), oncofetal antigen (h5T4), oncogene fusion protein consisting of breakpoint cluster region (BCR) and Abelson murine leukemia viral oncogene homolog 1 (Abl) (bcr-abl), Oryctolagus cuniculus, OX-40, oxLDL, p53 mutant, paired box protein Pax-3 (PAX3), paired box protein Pax-5 (PAXS), pannexin 3 (PANX3), P-cadherin, phosphate-sodium co-transporter, phosphatidylserine, placenta-specific 1 (PLAC1), platelet-derived growth factor receptor α (PDGF-R α), platelet-derived growth factor receptor β (PDGFR-β), polysialic acid, proacrosin binding protein sp32 (OY-TES1), programmed cell death protein 1 (PD-1), Programmed death-ligand 1 (PD-L1), proprotein convertase subtilisin/kexin type 9 (PCSK9), prostase, prostate carcinoma tumor antigen-1 (PCTA-1 or Galectin 8), melanoma antigen recognized by T cells 1 (MelanA or MART1), P15, P53, PRAME, prostate stem cell antigen (PSCA), prostate-specific membrane antigen (PSMA), prostatic acid phosphatase (PAP), prostatic carcinoma cells, prostein, Protease Serine 21 (Testisin or PRSS21), Proteasome (Prosome, Macropain) Subunit, β Type, 9 (LMP2), Pseudomonas aeruginosa, rabies virus glycoprotein, RAGE, Ras Homolog Family Member C (RhoC), receptor activator of nuclear factor kappa-B ligand (RANKL), Receptor for Advanced Glycation Endproducts (RAGE-1), receptor tyrosine kinase-like orphan receptor 1 (ROR1), renal ubiquitous 1 (RU1), renal ubiquitous 2 (RU2), respiratory syncytial virus, Rh blood group D antigen, Rhesus factor, sarcoma translocation breakpoints, sclerostin (SOST), selectin P, sialyl Lewis adhesion molecule (sLe), sperm protein 17 (SPA17), sphingosine-1-phosphate, squamous cell carcinoma antigen recognized by T Cells 1, 2, and 3 (SART1, SART2, and SART3), stage-specific embryonic antigen-4 (SSEA-4), Staphylococcus aureus, STEAP1, syndecan 1 (SDC1)+A314, SOX10, survivin, survivin-2B, synovial sarcoma, X breakpoint 2 (SSX2), T-cell receptor, TCR Γ Alternate Reading Frame Protein (TARP), telomerase, TEM1, tenascin C, TGF-β (e.g., TGF-β 1, TGF-β 2, TGF-β 3), thyroid stimulating hormone receptor (TSHR), tissue factor pathway inhibitor (TFPI), Tn antigen ((Tn Ag) or (GalNAcα-Ser/Thr)), TNF receptor family member B cell maturation (BCMA), TNF-α, TRAIL-R1, TRAIL-R2, TRG, transglutaminase 5 (TGS5), tumor antigen CTAA16.88, tumor endothelial marker 1 (TEM1/CD248), tumor endothelial marker 7-related (TEM7R), tumor protein p53 (p53), tumor specific glycosylation of MUC1, tumor-associated calcium signal transducer 2 (TROP-2), tumor-associated glycoprotein 72 (TAG72), tumor-associated glycoprotein 72 (TAG-72)+A327, TWEAK receptor, tyrosinase, tyrosinase-related protein 1 (TYRP1 or glycoprotein 75), tyrosinase-related protein 2 (TYRP2), uroplakin 2 (UPK2), vascular endothelial growth factor (e.g., VEGF-A, VEGF-B, VEGF-C, VEGF-D, PIGF), vascular endothelial growth factor receptor 1 (VEGFR1), vascular endothelial growth factor receptor 2 (VEGFR2), vimentin, v-myc avian myelocytomatosis viral oncogene neuroblastoma derived homolog (MYCN), von Willebrand factor (VWF), Wilms tumor protein (WT1), X Antigen Family, Member 1A (XAGE1), β-amyloid, κ-light chain, Fibroblast Growth Factor Receptor 2 (FGFR2), LIV-1 Protein, estrogen regulated (LIV1, aka SLC39A6), Neurotrophic Receptor Tyrosine Kinase 1 (NTRK1, aka TRK), Ret Proto-Oncogene (RET), B Cell Maturation Antigen (BCMA, aka TNFRSF17), Transferrin Receptor (TFRC, aka CD71), Activated Leukocyte Cell Adhesion Molecule (ALCAM, aka CD166), Somatostatin Receptor 2 (SSTR2), KIT Proto-Oncogene Receptor Tyrosine Kinase (cKIT), V-Set Immunoregulatory Receptor (VSIR, aka VISTA), Glycoprotein Nmb (GPNMB), Delta Like Canonical Notch Ligand 3 (DLL3), Interleukin 3 Receptor Subunit Alpha (IL3RA, aka CD123), Lysosomal Associated Membrane Protein 1 (LAMP1), Cadherin 3, Type 1, P-Cadherin (CDH3), Ephrin A4 (EFNA4), Protein Tyrosine Kinase 7 (PTK7), Solute Carrier Family 34 Member 2 (SLC34A2, aka NaPi-2b), Guanylyl Cyclase C (GCC), PLAUR Domain Containing 3 (LYPD3, aka LY6 or C4.4a), Mucin 17, Cell Surface Associated (MUC17), Fms Related Receptor Tyrosine Kinase 3 (FLT3), NKG2D ligands (e.g. ULBP1, ULBP2, ULBP3, H60, Rae-1α, Rae-1β, Rae-1δ, Rae-1γ, MICA, MICB, hHLA-A), SLAM Family Member 7 (SLAMF7), Interleukin 13 Receptor Subunit Alpha 2 (IL13RA2), C-Type Lectin Domain Family 12 Member A (CLEC12A aka CLL-1), CEA Cell Adhesion Molecule 5 (CEACAM aka CD66e), Interleukin 3 Receptor Subunit Alpha (IL3RA), CD5 Molecule (CD5), UL16 Binding Protein 1 (ILBP1), V-Set Domain Containing T Cell Activation Inhibitor 1 (VTCN1 aka B7-H4), Chondroitin Sulfate Proteoglycan 4 (CSPG4), Syndecan 1 (SDC1 aka CD138), Interleukin 1 Receptor Accessory Protein (IL1RAP), Baculoviral IAP Repeat Containing 5 (BIRC5 aka Survivin), CD74 Molecule (CD74), Hepatitis A Virus Cellular Receptor 1 (HAVCR1 aka TIM1), SLIT and NTRK Like Family Member 6 (SILTRK6), CD37 Molecule (CD37), Coagulation Factor III, Tissue Factor (CD142 aka F3), AXL Receptor Tyrosine Kinase (AXL), Endothelin Receptor Type B (EDNRB aka ETBR), Cadherin 6 (CDH6), Fibroblast Growth Factor Receptor 3 (FGFR3), Carbonic Anhydrase 6 (CA6), CanAg glycoform of MUC1, Integrin Subunit Alpha V (ITGAV), Teratocarcinoma-Derived Growth Factor 1 (TDGF1, aka Crypto 1), SLAM Family Member 6 (SLAMF6 aka CD352), and Notch Receptor 3 (NOTCH3).

[0032] In some embodiments, the CDR of the AF2 is selected from a CDR sequence of the sequences of SEQ ID NOs:719-918. In certain embodiments, the AF2 comprises VL and VH of a monoclonal antibody having binding affinity to the target cell marker. In certain embodiments, the VL sequences are selected from the sequences of SEQ ID NOs:719-818 and VH sequences are selected from the sequences of SEQ ID NOs:819-918.

[0033] In some embodiments, the AF2 specifically binds the target cell marker with a K_{d} between about 0.1 nM and about 100 nM, as determined in an in vitro antigen-binding assay comprising the target cell marker. In certain embodiments, the binding affinity of the AF2 to the target cell marker is at least 10-fold greater, or at least 100-fold greater, or at least 1000-fold greater than the binding affinity of the AF1 to CD3, as measured in an in vitro antigen-binding assay. In certain embodiments, the AF2 comprises a CDR of a monoclonal antibody having binding affinity to the target cell marker.

[0034] In certain embodiments, the polypeptide disclosed herein, further comprises a second release segment (RS2), wherein the RS2 is a substrate for cleavage by a mammalian protease. In some embodiments, the RS2 is a substrate for a protease selected from legumain, MMP-2, MMP-7, MMP-9, MMP-11, MMP-14, uPA, and matriptase. In other embodiments, the RS2 comprises an amino acid sequence having at least 90%, 91%, 92%, 93%, 94%, 95%, 96%, 97%, 98%, 99% sequence identity to a sequence selected from SEQ ID NOs:42-660. In another embodiment, the sequences of RS1 and RS2 are identical. In yet another embodiment, the sequences of RS1 and RS2 are not identical. In some embodiments, the RS1 and RS2 are each a substrate for cleavage by multiple proteases at one, two, or three cleavage sites within each release segment sequence.

[0035] In some embodiments, the polypeptide disclosed herein further comprises a second extended recombinant polypeptide (XTEN2) wherein the XTEN2 is characterized in that a. it has at least about 36 amino acids or at least about 100 amino acids; b. at least 90%, 91%, 92%, 93%, 94%, 95%, 96%, 97%, 98%, 99% or 100% of the amino acid residues of the XTEN1 sequence are selected from glycine (G), alanine (A), serine (S), threonine (T), glutamate (E) and proline (P); and c. it has at least 4-6 different amino acids selected from G, A, S, T, E and P. In other embodiments, the XTEN2 comprises an amino acid sequence, wherein at least 90%, 91%, 92%, 93%, 94%, 95%, 96%, 97%, 98%, 99% or 100% of the amino acid sequence comprises non-overlapping sequences selected from at least three of SEQ ID NOs:661-664. In another embodiment, the XTEN2 comprises an amino acid sequence having at least about 90%, 91%, 92%, 93%, 94%, 95%, 96%, 97%, 98%, 99%, or 100% sequence identity to a sequence selected from SEQ ID NOs: 665-718 and 922-926. In certain embodiments, the XTEN2 comprises an amino acid sequence having at least about 90%, 91%, 92%, 93%, 94%, 95%, 96%, 97%, 98%, 99%, or 100% sequence identity to a sequence selected from the sequences of AE144_1A, AE144_2A, AE144_2B, AE144_3A, AE144_3B, AE144_4A, AE144_4B, AE144_5A, AE144_6B, AE144_7A, AE284, AE288_1, AE288_2, AE288_3, AE292, AE293, AE300, AE576, AE584, AE864, AE864_2, AE865, AE866, AE867, and AE868, each of which being set forth in Table 7.

[0036] In other embodiments, the polypeptide has a structural arrangement from N-terminus to C-terminus as follows: XTEN1-RS1-AF2-AF1-RS2-XTEN2, XTEN1-RS1-AF1-AF2-RS2-XTEN2, XTEN2-RS2-AF2-AF1-RS1-XTEN1, XTEN2-RS2-AF1-AF2-RS1-XTEN1, XTEN2-RS2-diabody-RS1-XTEN1, or XTEN1-RS1-diabody-RS2-XTEN2, wherein the diabody comprises VL and VH of the AF1 and AF2, wherein the AF1 specifically binds CD3 and AF2 specifically binds a target cell marker, and wherein XTEN 1 and XTEN2 are of different amino acid length or sequence.

[0037] In some other embodiments, the AF1 is fused to the AF2 by a flexible peptide linker wherein a. the AF2 specifically binds to a second reference antigen other than CD3 such that the polypeptide is a bispecific antigen binding fragment capable of binding both CD3 and the second reference antigen; b. the bispecific antigen binding fragment exhibits a higher thermal stability, as determined by an increase in melting temperature (Tₘ) in an in vitro assay relative to a control bispecific antigen binding fragment wherein said control bispecific antigen binding fragment comprises SEQ ID NO:41 and AF2.

[0038] In certain embodiments, the second reference antigen is a target cell marker selected from 1-40-β-amyloid, 4-1BB, 5AC, 5T4, 707-AP, A kinase anchor protein 4 (AKAP-4), activin receptor type-2B (ACVR2B), activin receptor-like kinase 1 (ALK1), adenocarcinoma antigen, adipophilin, adrenoceptor β3 (ADRB3), AGS-22M6, α folate receptor, α-fetoprotein (AFP), AIM-2, anaplastic lymphoma kinase (ALK), androgen receptor, angiopoietin 2, angiopoietin 3, angiopoietin-binding cell surface receptor 2 (Tie 2), anthrax toxin, AOC3 (VAP-1), B cell maturation antigen (BCMA), B7-H3 (CD276), Bacillus anthracis anthrax, B-cell activating factor (BAFF), B-lymphoma cell, bone marrow stromal cell antigen 2 (BST2), Brother of the Regulator of Imprinted Sites (BORIS), C242 antigen, C5, CA-125, cancer antigen 125 (CA-125 or MUC16), Cancer/testis antigen 1 (NY-ESO-1), Cancer/testis antigen 2 (LAGE-1a), carbonic anhydrase 9 (CA-IX), Carcinoembryonic antigen (CEA), cardiac myosin, CCCTC-Binding Factor (CTCF), CCL11 (eotaxin-1), CCR4, CCR5, CCR6, CCR7, CCR8, CCR9, CD11, CD123, CD125, CD140a, CD147 (basigin), CD15, CD152, CD154 (CD40L), CD171, CD179a, CD18, CD19, CD2, CD20, CD200, CD22, CD221, CD23 (IgE receptor), CD24, CD25 (α chain of IL-2 receptor), CD27, CD274, CD28, CD3, CD3 ε, CD30, CD300 molecule-like family member f (CD300LF), CD319 (SLAMF7), CD33, CD37, CD38, CD4, CD40, CD40 ligand, CD41, CD44 v7, CD44 v8, CD44 v6, CD5, CD51, CD52, CD56, CD6, CD70, CD72, CD74, CD79A, CD79B, CD80, CD97, CEA-related antigen, CFD, ch4D5, chromosome X open reading frame 61 (CXORF61), claudin 18.2 (CLDN18.2), claudin 6 (CLDN6), Clostridium difficile, clumping factor A, CLCA2, colony stimulating factor 1 receptor (CSF1R), CSF2, CTLA-4, C-type lectin domain family 12 member A (CLEC12A), C-type lectin-like molecule-1 (CLL-1 or CLECL1), C-X-C chemokine receptor type 4, cyclin B1, cytochrome P4501B1 (CYP1B1), cyp-B, cytomegalovirus, cytomegalovirus glycoprotein B, dabigatran, DLL4, DPP4, DR5, E. coli shiga toxin type-1, E. coli shiga toxin type-2, ecto-ADP-ribosyltransferase 4 (ART4), EGF-like module-containing mucin-like hormone receptor-like 2 (EMR2), EGF-like-domain multiple 7 (EGFL7), elongation factor 2 mutated (ELF2M), endotoxin, Ephrin A2, Ephrin B2, ephrin type-A receptor 2, epidermal growth factor receptor (EGFR), epidermal growth factor receptor variant III (EGFRvIII), episialin, epithelial cell adhesion molecule (EpCAM), epithelial glycoprotein 2 (EGP-2), epithelial glycoprotein 40 (EGP-40), ERBB2, ERBB3, ERBB4, ERG (transmembrane protease, serine 2 (TMPRSS2) ETS fusion gene), Escherichia coli, ETS translocation-variant gene 6, located on chromosome 12p (ETV6-AML), F protein of respiratory syncytial virus, FAP, Fc fragment of IgA receptor (FCAR or CD89), Fc receptor-like 5 (FCRLS), fetal acetylcholine receptor, fibrin II β chain, fibroblast activation protein α (FAP), fibronectin extra domain-B, FGF-5, Fms-Like Tyrosine Kinase 3 (FLT3), folate binding protein (FBP), folate hydrolase, folate receptor 1, folate receptor α, folate receptor β, Fos-related antigen 1, Frizzled receptor, Fucosyl GM1, G250, G protein-coupled receptor 20 (GPR20), G protein-coupled receptor class C group 5, member D (GPRC5D), ganglioside G2 (GD2), GD3 ganglioside, glycoprotein 100 (gp100), glypican-3 (GPC3), GMCSF receptor α-chain, GPNMB, GnT-V, growth differentiation factor 8, GUCY2C, heat shock protein 70-2 mutated (mut hsp70-2), hemagglutinin, Hepatitis A virus cellular receptor 1 (HAVCR1), hepatitis B surface antigen, hepatitis B virus, HER1, HER2/neu, HER3, hexasaccharide portion of globoH glycoceramide (GloboH), HGF, HHGFR, high molecular weight-melanoma-associated antigen (HMW-MAA), histone complex, HIV-1, HLA-DR, HNGF, Hsp90, HST-2 (FGF6), human papilloma virus E6 (HPV E6), human papilloma virus E7 (HPV E7), human scatter factor receptor kinase, human Telomerase reverse transcriptase (hTERT), human TNF, ICAM-1 (CD54), iCE, IFN-α, IFN-β, IFN-γ, IgE, IgE Fc region, IGF-1, IGF-1 receptor, IGHE, IL-12, IL-13, IL-17, IL-17A, IL-17F, IL-1β, IL-20, IL-22, IL-23, IL-31, IL-31RA, IL-4, IL-5, IL-6, IL-6 receptor, IL-9, immunoglobulin lambda-like polypeptide 1 (IGLL1), influenza A hemagglutinin, insulin-like growth factor 1 receptor (IGF-I receptor), insulin-like growth factor 2 (ILGF2), integrin α4β7, integrin β2, integrin α2, integrin α4, integrin α5β1, integrin α7β7, integrin αIIbβ3, integrin αvβ3, interferon α/β receptor, interferon γ-induced protein, Interleukin 11 receptor α (IL-11Rα), Interleukin-13 receptor subunit α-2 (IL-13Ra2 or CD213A2), intestinal carboxyl esterase, kinase domain region (KDR), KIR2D, KIT (CD117), L1-cell adhesion molecule (L1-CAM), legumain, leukocyte immunoglobulin-like receptor subfamily A member 2 (LILRA2), leukocyte-associated immunoglobulin-like receptor 1 (LAIR1), lymphocyte antigen 6 (Ly-6), Lewis-Y antigen, LFA-1 (CD11a), LINGO-1, lipoteichoic acid, LOXL2, L-selectin (CD62L), lymphocyte antigen 6 complex, locus K 9 (LY6K), lymphocyte antigen 75 (LY75), lymphocyte-specific protein tyrosine kinase (LCK), lymphotoxin-α (LT-α) or Tumor necrosis factor-0 (TNF-β), Lysosomal Associated Membrane Protein 1 (LAMP1), macrophage migration inhibitory factor (MIF or MMIF), M-CSF, mammary gland differentiation antigen (NY-BR-1), MCP-1, melanoma cancer testis antigen-1 (MAD-CT-1), melanoma cancer testis antigen-2 (MAD-CT-2), melanoma inhibitor of apoptosis (ML-IAP), melanoma-associated antigen 1 (MAGE-A1), mesothelin, mucin 1, cell surface associated (MUC1), MUC-2, MUC3, MUC4, MUC5AC, MUC5B, MUC7, MUC16, mucin CanAg, myelin-associated glycoprotein, myostatin, N-Acetyl glucosaminyl-transferase V (NA17), NCA-90 (granulocyte antigen), Nectin-4, nerve growth factor (NGF), neural apoptosis-regulated proteinase 1, neural cell adhesion molecule (NCAM), neurite outgrowth inhibitor (e.g., NOGO-A, NOGO-B, NOGO-C), neuropilin-1 (NRP1), N-glycolylneuraminic acid, NKG2D, Notch receptor, o-acetyl-GD2 ganglioside (OAcGD2), olfactory receptor 51E2 (OR51E2), oncofetal antigen (h5T4), oncogene fusion protein consisting of breakpoint cluster region (BCR) and Abelson murine leukemia viral oncogene homolog 1 (Abl) (bcr-abl), Oryctolagus cuniculus, OX-40, oxLDL, p53 mutant, paired box protein Pax-3 (PAX3), paired box protein Pax-5 (PAXS), pannexin 3 (PANX3), P-cadherin, phosphate-sodium co-transporter, phosphatidylserine, placenta-specific 1 (PLAC1), platelet-derived growth factor receptor α (PDGF-R α), platelet-derived growth factor receptor β (PDGFR-β), polysialic acid, proacrosin binding protein sp32 (OY-TES1), programmed cell death protein 1 (PD-1), Programmed death-ligand 1 (PD-L1), proprotein convertase subtilisin/kexin type 9 (PCSK9), prostase, prostate carcinoma tumor antigen-1 (PCTA-1 or Galectin 8), melanoma antigen recognized by T cells 1 (MelanA or MART1), P15, P53, PRAME, prostate stem cell antigen (PSCA), prostate-specific membrane antigen (PSMA), prostatic acid phosphatase (PAP), prostatic carcinoma cells, prostein, Protease Serine 21 (Testisin or PRSS21), Proteasome (Prosome, Macropain) Subunit, β Type, 9 (LMP2), Pseudomonas aeruginosa, rabies virus glycoprotein, RAGE, Ras Homolog Family Member C (RhoC), receptor activator of nuclear factor kappa-B ligand (RANKL), Receptor for Advanced Glycation Endproducts (RAGE-1), receptor tyrosine kinase-like orphan receptor 1 (ROR1), renal ubiquitous 1 (RU1), renal ubiquitous 2 (RU2), respiratory syncytial virus, Rh blood group D antigen, Rhesus factor, sarcoma translocation breakpoints, sclerostin (SOST), selectin P, sialyl Lewis adhesion molecule (sLe), sperm protein 17 (SPA17), sphingosine-1-phosphate, squamous cell carcinoma antigen recognized by T Cells 1, 2, and 3 (SART1, SART2, and SART3), stage-specific embryonic antigen-4 (SSEA-4), Staphylococcus aureus, STEAP1, syndecan 1 (SDC1)+A314, SOX10, survivin, survivin-2B, synovial sarcoma, X breakpoint 2 (SSX2), T-cell receptor, TCR F Alternate Reading Frame Protein (TARP), telomerase, TEM1, tenascin C, TGF-β (e.g., TGF-β1, TGF-β2, TGF-β3), thyroid stimulating hormone receptor (TSHR), tissue factor pathway inhibitor (TFPI), Tn antigen ((Tn Ag) or (GalNAcα-Ser/Thr)), TNF receptor family member B cell maturation (BCMA), TNF-α, TRAIL-R1, TRAIL-R2, TRG, transglutaminase 5 (TGS5), tumor antigen CTAA16.88, tumor endothelial marker 1 (TEM1/CD248), tumor endothelial marker 7-related (TEM7R), tumor protein p53 (p53), tumor specific glycosylation of MUC1, tumor-associated calcium signal transducer 2 (TROP-2), tumor-associated glycoprotein 72 (TAG72), tumor-associated glycoprotein 72 (TAG-72)+A327, TWEAK receptor, tyrosinase, tyrosinase-related protein 1 (TYRP1 or glycoprotein 75), tyrosinase-related protein 2 (TYRP2), uroplakin 2 (UPK2), vascular endothelial growth factor (e.g., VEGF-A, VEGF-B, VEGF-C, VEGF-D, PIGF), vascular endothelial growth factor receptor 1 (VEGFR1), vascular endothelial growth factor receptor 2 (VEGFR2), vimentin, v-myc avian myelocytomatosis viral oncogene neuroblastoma derived homolog (MYCN), von Willebrand factor (VWF), Wilms tumor protein (WT1), X Antigen Family, Member 1A (XAGE1), β-amyloid, κ-light chain, Fibroblast Growth Factor Receptor 2 (FGFR2), LIV-1 Protein, estrogen regulated (LIV1, aka SLC39A6), Neurotrophic Receptor Tyrosine Kinase 1 (NTRK1, aka TRK), Ret Proto-Oncogene (RET), B Cell Maturation Antigen (BCMA, aka TNFRSF17), Transferrin Receptor (TFRC, aka CD71), Activated Leukocyte Cell Adhesion Molecule (ALCAM, aka CD166), Somatostatin Receptor 2 (SSTR2), KIT Proto-Oncogene Receptor Tyrosine Kinase (cKIT), V-Set Immunoregulatory Receptor (VSIR, aka VISTA), Glycoprotein Nmb (GPNMB), Delta Like Canonical Notch Ligand 3 (DLL3), Interleukin 3 Receptor Subunit Alpha (IL3RA, aka CD123), Lysosomal Associated Membrane Protein 1 (LAMP1), Cadherin 3, Type 1, P-Cadherin (CDH3), Ephrin A4 (EFNA4), Protein Tyrosine Kinase 7 (PTK7), Solute Carrier Family 34 Member 2 (SLC34A2, aka NaPi-2b), Guanylyl Cyclase C (GCC), PLAUR Domain Containing 3 (LYPD3, aka LY6 or C4.4a), Mucin 17, Cell Surface Associated (MUC17), Fms Related Receptor Tyrosine Kinase 3 (FLT3), NKG2D ligands (e.g. ULBP1, ULBP2, ULBP3, H60, Rae-1α, Rae-1β, Rae-1δ, Rae-1γ, MICA, MICB, hHLA-A), SLAM Family Member 7 (SLAMF7), Interleukin 13 Receptor Subunit Alpha 2 (IL13RA2), C-Type Lectin Domain Family 12 Member A (CLEC12A aka CLL-1), CEA Cell Adhesion Molecule 5 (CEACAM aka CD66e), Interleukin 3 Receptor Subunit Alpha (IL3RA), CD5 Molecule (CD5), UL16 Binding Protein 1 (ILBP1), V-Set Domain Containing T Cell Activation Inhibitor 1 (VTCN1 aka B7-H4), Chondroitin Sulfate Proteoglycan 4 (CSPG4), Syndecan 1 (SDC1 aka CD138), Interleukin 1 Receptor Accessory Protein (IL1RAP), Baculoviral IAP Repeat Containing 5 (BIRC5 aka Survivin), CD74 Molecule (CD74), Hepatitis A Virus Cellular Receptor 1 (HAVCR1 aka TIM1), SLIT and NTRK Like Family Member 6 (SILTRK6), CD37 Molecule (CD37), Coagulation Factor III, Tissue Factor (CD142 aka F3), AXL Receptor Tyrosine Kinase (AXL), Endothelin Receptor Type B (EDNRB aka ETBR), Cadherin 6 (CDH6), Fibroblast Growth Factor Receptor 3 (FGFR3), Carbonic Anhydrase 6 (CA6), CanAg glycoform of MUC1, Integrin Subunit Alpha V (ITGAV), Teratocarcinoma-Derived Growth Factor 1 (TDGF1, aka Crypto 1), SLAM Family Member 6 (SLAMF6 aka CD352), and Notch Receptor 3 (NOTCH3).

[0039] In some embodiments, (1) the AF2 fragment disclosed herein is selected from the group consisting of Fv, Fab, Fab′, Fab′-SH, linear antibody, a single domain antibody, and single-chain variable fragment (scFv), or (2) the AF1 and AF2 disclosed herein are configured as an (Fab′)2 or a single chain diabody.

[0040] In certain embodiments, the binding affinity of the AF2 to the target cell marker is at least 10-fold greater, or at least 100-fold greater, or at least 1000-fold greater than the binding affinity of the AF1 to CD3, as measured in an in vitro antigen-binding assay.

[0041] In some other embodiments, the AF1 and AF2 each exhibit an isoelectric point (pI) that is less than or equal to 6.6. In another embodiment, the AF1 and AF2 each exhibit a pI that is between 5.5 and 6.6, inclusive. In certain embodiments, the pI of AF1 is within 0.1, 0.2, 0.3, 0.4, 0.5, 0.6, 0.7, 0.8, 0.9, 1.0, 1.1, 1.2, 1.3, 1.4, or 1.5 pH units of the pI of the AF2.

[0042] In yet another aspect, disclosed herein is a polypeptide comprising an antigen binding fragment, wherein the antigen binding fragment comprises light chain complementarity-determining regions (CDR-L) and heavy chain complementarity-determining regions (CDR-H), wherein the antigen binding fragment a. specifically binds to the epsilon subunit of CD3; and b. comprises a VH amino acid sequence comprising SEQ ID NO: 920. In some embodiments, the antigen binding fragment comprises a VL amino acid sequence comprising SEQ ID NO: 919. In certain embodiments, the antigen binding fragment consists of SEQ ID NO: 921.

[0043] In one aspect, disclosed herein is a pharmaceutical composition comprising the polypeptide disclosed herein and one or more pharmaceutically suitable excipients. In some embodiments, the pharmaceutical composition is formulated for intradermal, subcutaneous, intravenous, intra-arterial, intraabdominal, intraperitoneal, intrathecal, or intramuscular administration. In another embodiment, the pharmaceutical composition is in a liquid form. In another embodiment, the pharmaceutical composition is in a pre-filled syringe for a single injection. In yet another embodiment, the pharmaceutical composition is formulated as a lyophilized powder to be reconstituted prior to administration.

[0044] In another aspect, disclosed herein is use of the polypeptide disclosed herein in the preparation of a medicament for the treatment of a disease in a subject. In some embodiments, the disease is selected from the group consisting of carcinomas, Hodgkin's lymphoma, non-Hodgkin's lymphoma, B cell lymphoma, diffuse large B cell lymphoma, T-cell lymphoma, follicular lymphoma, mantle cell lymphoma, blastoma, breast cancer, colon cancer, prostate cancer, head and neck cancer, any form of skin cancer, melanoma, genito-urinary tract cancer, ovarian cancer, ovarian cancer with malignant ascites, vaginal cancer, vulvar cancer, Ewing sarcoma, peritoneal carcinomatosis, uterine serous carcinoma, parathyroid cancer, endometrial cancer, cervical cancer, colorectal cancer, an epithelia intraperitoneal malignancy with malignant ascites, uterine cancer, mesothelioma in the peritoneum kidney cancers, lung cancer, laryngeal cancer, small-cell lung cancer, non-small cell lung cancer, gastric cancer, esophageal cancer, stomach cancer, small intestine cancer, liver cancer, hepatocarcinoma, retinoblastoma, hepatoblastoma, liposarcoma, pancreatic cancer, gall bladder cancer, testicular cancer, cancers of the bile duct, cancers of the bone, salivary gland carcinoma, thyroid cancer, craniopharyngioma, carcinoid tumor, epithelial cancer, arrhenoblastoma, adenocarcinoma, sarcomas of any origin, primary hematologic malignancies including acute or chronic lymphocytic leukemias, acute or chronic myelogenous leukemias, B-cell derived chronic lymphatic leukemia, hairy cell leukemia, myeloproliferative neoplastic disorders, or myelodysplastic disorders, myasthenia gravis, Morbus Basedow, Kaposi sarcoma, neuroblastoma, Hashimoto thyroiditis, Wilms tumor, or Goodpasture syndrome.

[0045] In yet another aspect, disclosed herein is a method of treating a disease in a subject, comprising administering to the subject in need thereof one or more therapeutically effective doses of the pharmaceutical composition disclosed herein. In certain embodiments, the subject is selected from the group consisting of mouse, rat, monkey, and human. In some embodiments, the disease is selected from the group consisting of carcinomas, Hodgkin's lymphoma, non-Hodgkin's lymphoma, B cell lymphoma, T-cell lymphoma, follicular lymphoma, mantle cell lymphoma, blastoma, breast cancer, colon cancer, prostate cancer, head and neck cancer, any form of skin cancer, melanoma, genito-urinary tract cancer, ovarian cancer, ovarian cancer with malignant ascites, peritoneal carcinomatosis, uterine serous carcinoma, endometrial cancer, cervical cancer, colorectal cancer, an epithelia intraperitoneal malignancy with malignant ascites, uterine cancer, mesothelioma in the peritoneum kidney cancers, lung cancer, small-cell lung cancer, non-small cell lung cancer, gastric cancer, esophageal cancer, stomach cancer, small intestine cancer, liver cancer, hepatocarcinoma, hepatoblastoma, liposarcoma, pancreatic cancer, gall bladder cancer, cancers of the bile duct, salivary gland carcinoma, thyroid cancer, epithelial cancer, adenocarcinoma, sarcomas of any origin, primary hematologic malignancies including acute or chronic lymphocytic leukemias, acute or chronic myelogenous leukemias, myeloproliferative neoplastic disorders, or myelodysplastic disorders, myasthenia gravis, Morbus Basedow, Hashimoto thyroiditis, or Goodpasture syndrome.

[0046] In other embodiments, the pharmaceutical composition is administered to the subject as one or more therapeutically effective doses administered twice weekly, once a week, every two weeks, every three weeks, every four weeks, or monthly. In certain embodiments, the pharmaceutical composition is administered to the subject as one or more therapeutically effective doses over a period of at least two weeks, or at least one month, or at least two months, or at least three months, or at least four months, or at least five months, or at least six months. In some embodiments, the dose is administered intradermally, subcutaneously, intravenously, intra-arterially, intra-abdominally, intraperitoneally, intrathecally, or intramuscularly.

[0047] In one aspect, disclosed herein is an isolated nucleic acid, the nucleic acid comprising (a) a polynucleotide encoding a polypeptide disclosed herein; or (b) the complement of the polynucleotide of (a).

[0048] In a related aspect, disclosed herein is an expression vector comprising the polynucleotide sequence disclosed herein and a recombinant regulatory sequence operably linked to the polynucleotide sequence.

[0049] In another aspect, disclosed herein is an isolated host cell, comprising the expression vector disclosed herein. In some embodiments, the host cell is a prokaryote. In one embodiment, the host cell is E. coli.

### INCORPORATION BY REFERENCE

[0050] All publications, patents, and patent applications mentioned in this specification are herein incorporated by reference to the same extent as if each individual publication, patent, or patent application was specifically and individually indicated to be incorporated by reference.

### BRIEF DESCRIPTION OF THE DRAWINGS

[0051] Various features of this disclosure are set forth with particularity in the appended claims. A better understanding of the features and advantages of the present disclosure will be obtained by reference to the following detailed description that sets forth illustrative embodiments, in which the principles of the invention are utilized, and the accompanying drawings of which:

[0052] FIG. 1 (FIG. 1) depicts the individual components of a bispecific antigen binding fragment composition. FIG. 1A depicts an antigen binding fragment having affinity to a target cell marker. FIG. 1B depicts an antigen binding fragment having affinity to an effector cell. FIGS. 1C and 1D depict XTEN polypeptides of different length. FIG. 1E depicts a cleavable release segment.

[0053] FIG. 2(FIG. 2) depicts two different forms of the polypeptide compositions described herein. FIG. 2A depicts, on the left side, an antigen binding fragment to an effector cell fused with a release segment and an XTEN, while the arrow depicts the action of a protease to cleave the release segment leading to, on the right hand side, the release of the XTEN from the antigen binding fragment of the polypeptide, such that the antigen-binding fragment regains its full binding affinity potential as it is no longer shielded by the XTEN. FIG. 2B depicts, on the left side, a bispecific composition having an antigen binding fragment to an effector cell fused to an antigen binding fragment having binding affinity to a target cell marker. A release segment and an XTEN are also fused to the antigen binding fragment having affinity to the effector cell, while the arrow depicts the action of a protease to cleave the release segment leading to, on the right-hand side, the release of the XTEN and the fused antigen binding fragments from the polypeptide, which would then regain their full binding affinity potential as they are no longer shielded by the XTEN.

[0054] FIG. 3 (FIG. 3) depicts two different forms of a bispecific antigen binding polypeptide. On the left side, a bispecific composition having an antigen binding fragment to an effector cell is fused to an antigen binding fragment having binding affinity to a target cell marker with the release segment (with the scissors indicating susceptibility to protease cleavage) and the XTEN is fused to the antigen binding fragment having binding affinity to an effector cell, while on the right hand side, a bispecific composition having an antigen binding fragment to an effector cell is fused to an antigen binding fragment having binding affinity to a target cell marker, with the release segment and the XTEN fused to the antigen binding fragment having binding affinity to the target cell marker.

[0055] FIG. 4 (FIG. 4) depicts three different forms of a bispecific antigen-binding polypeptide. FIG. 4A depicts a bispecific composition having an scFv antigen binding fragment to an effector cell fused to an scFv antigen binding fragment having binding affinity to a target cell marker with a release segment (with the scissors indicating susceptibility to protease cleavage) and an XTEN fused to each antigen binding fragment. FIGS. 4B and 4C are variations of 4A in which the antigen binding fragments are in a diabody configuration, with the release segments (with the scissors indicating susceptibility to protease cleavage) and XTENs fused to the antigen binding fragment to an effector cell or the target cell marker, respectively.

[0056] FIG. 5 (FIG. 5) shows schematic representations of a bispecific antigen binding polypeptide in proximity to tumor tissue (on the top) and normal tissue (on the bottom). The bispecific antigen binding polypeptide is preferentially cleaved at the tumor tissue to release one or more XTEN moieties as compared to that in the normal tissue. The cleaved bispecific antigen binding polypeptide is capable of binding to a T cell and a tumor cell expressing a tumor-specific marker.

[0057] FIG. 6 (FIG. 6) depicts the amino acid sequence of the control release segment RSR-1517 (SEQ ID NO:42), showing the sites of peptide cleavage for the listed proteases.

[0058] FIG. 7 (FIG. 7) shows in vitro cytotoxic activity of an N- and C-terminally XTENylated anti-HER2-anti-CD3 XPAT construct (“HER2-XPAT”) versus the same construct non-XTENylated (“HER2-PAT”) in a PBMC/BT-474 cell cytotoxicity assay. Cytotoxicity was assessed by caspase 3/7 assay or luminescent ATP assay, respectively.

[0059] FIGS. 8A-8B (FIGS. 8A-8B) shows that in vitro toxicity of non-XTENylated HER2-CD3 construct correlates to HER2 expression. (A) shows dose response of non-XTENylated HER2-CD3 construct (“HER2-PAT”) in cell lines with varying HER2 expression in the presence of PBMCs. (B) shows dose response of non-XTENylated HER2-CD3 construct (“HER2-PAT”) vs XTENylated HER2-CD3 construct (“HER2-XPAT”) in select cell lines with varying HER2 expression in the presence of PBMCs.

[0060] FIG. 8C illustrates that relatively low levels of unmasking of an exemplary XTENylated HER2-CD3 construct (“HER2-XPAT”) are required to elicit a significant increase in cytotoxicity. For example, FIG. 8C shows that, at 10 nM total concentration, 1% unmasked PAT (0.1 nM) and 99% masked XPAT yields maximal activity equivalent to maximal activity of 100% PAT.

[0061] FIG. 9A (FIG. 9A) illustrates a proposed model of how the HER2-PAT molecule forms an immunological synapse between T-cell and HER2-positive cell.

[0062] FIG. 9B (FIG. 9B) shows that HER2-PAT and HER2-XPAT constructs are capable of inducing conventional markers of T-cell activation in “natural” T-cells (supplied as PBMCs). FIGURE B shows a dose response of non-XTENylated HER2-CD3 construct (“HER2-PAT”) versus XTENylated HER2-CD3 construct (“HER2-XPAT”) on upregulation of CD69+ T-cells (an early marker of T-cell activation) in PBMCs in the presence of HER2+ cells (SK-OV-3 cells) as assessed by flow cytometry.

[0063] FIG. 9C (FIG. 9C) shows PD-1+ T cell activation upon exposure to HER2-PAT and HER2-XPAT constructs. More specifically, FIG. 9C shows a dose-dependent response of non-XTENylated HER2-CD3 construct (“HER2-PAT”) versus XTENylated HER2-CD3 construct (“HER2-XPAT”) on PD-1+ expression in T-cells in PBMCs in the presence of HER2+ cells (SK-OV-3 cells) as assessed by flow cytometry.

[0064] FIG. 9D (FIG. 9D) shows TNF-alpha secretion upon exposure to HER2-PAT and HER2-XPAT constructs. More specifically, FIG. 9D shows a dose-dependent response of non-XTENylated HER2-CD3 construct (“HER2-PAT”) versus XTENylated HER2-CD3 construct (“HER2-XPAT”) on TNF-alpha secretion when a mixture of PBMCs and SKOV3 cells are exposed to such constructs as assessed by flow cytometry.

[0065] FIG. 9E (FIG. 9E) shows IL-2 secretion upon exposure to HER2-PAT and HER2-XPAT constructs. More specifically, FIG. 9E shows a dose-dependent response of non-XTENylated HER2-CD3 construct (“HER2-PAT”) versus XTENylated HER2-CD3 construct (“HER2-XPAT”) on IL-2 secretion when a mixture of PBMCs and SKOV3 cells are exposed to such constructs as assessed by flow cytometry.

[0066] FIG. 9F (FIG. 9F) shows IL-6 secretion upon exposure to HER2-PAT and HER2-XPAT constructs. More specifically, FIG. 9F shows a dose-dependent response of non-XTENylated HER2-CD3 construct (“HER2-PAT”) versus XTENylated HER2-CD3 construct (“HER2-XPAT”) on IL-6 secretion when a mixture of PBMCs and SKOV3 cells are exposed to such constructs as assessed by flow cytometry.

[0067] FIG. 10A (FIG. 10A) shows that HER2-XPAT shows significantly decreased cytotoxicity in an in vitro PBMC/cardiomyocyte model versus non-XTENylated HER2-PAT.

[0068] FIGS. 11A-11B (FIGS. 11A-11B) shows that T-cell activation by the HER2-PAT and HER2-XPAT constructs is dependent on engagement of HER2-positive cells. FIG. 11(A) shows activation of T-cells by HER2-PAT or HER2-XPAT in the presence or absence of BT-474 HER2+ cells in an in vitro Jurkat T cell/BT-474 model as measured by luciferase activity driven by NFAT response elements in Jurkat T cells. FIG. 11(B) shows similar data showing activation of T-cells by HER2-PAT or HER2-XPAT in the presence or absence of SK-OV-3 cells in an in vitro Jurkat T cell/SK-OV-3 model.

[0069] FIG. 12 (FIG. 12) shows that single (N- or C-) terminus XTENylation causes intermediate reduction of Jurkat cell activation by XTENylated HER2-CD3 molecules in the presence of HER2 positive cells. (A) shows dose response of Jurkat cell activation non-XTENylated HER2-CD3 construct, single terminus XTENylated HER2-CD3 construct, or N- and C-terminally XTENylated HER2-CD3 molecule in the presence of BT-474 cells. (B) shows dose response of Jurkat cell activation by non-XTENylated HER2-CD3 construct, single terminus XTENylated HER2-CD3 construct, or N- and C-terminally XTENylated HER2-CD3 molecule in the presence of SK-OV-3 cells.

[0070] FIG. 13 (FIG. 13) shows that an N- and C-terminally XTENylated anti-HER2-anti-CD3 molecule (“XPAT”) and non-XTENylated HER2-CD3 molecule (“PAT”) are effective at decreasing tumor burden in a BT-474/human PBMC xenograft model, and that the anti-tumor activity of XTENylated HER2-CD3 molecule (“XPAT”) depends on cleavage of the XTEN molecules. (A) shows tumor volume post treatment with vehicle +/− PBMCs, XTENylated HER2-CD3 molecule (“XPAT”) and non-XTENylated HER2-CD3 molecule (“PAT”) over 25 days. (B) shows tumor volume post treatment with vehicle +PBMCs, XTENylated HER2-CD3 molecule (“XPAT”) and XTENylated HER2-CD3 molecule with non-cleavable XTEN over 25 days.

[0071] FIGS. 14A-14D (FIGS. 14A-14D) shows that N- and C-terminally XTENylated HER2-CD3 molecule (“HER2-XPAT”) and non-XTENylated HER2-CD3 molecule (“HER2-PAT”) are effective at increasing populations of activated CD4+ and CD8+ tumor infiltrating lymphocytes in tumor tissue taken from a BT-474/human PBMC xenograft model post-treatment. FIG. 14(A) shows percentage of “activated” (e.g. as measured by CD25+ expression) CD4+ cells in tumors as assessed by flow cytometry after treatment with vehicle, HER2-XPAT, or HER2-PAT. (B) shows percentage of “activated” (e.g. as measured by CD25+ expression) CD8+ cells in tumors as assessed by flow cytometry after treatment with vehicle, HER2-XPAT, or HER2-PAT. FIG. 14(C) shows percentage of “activated” (e.g. as measured by CD69+ expression) CD4+ cells in tumors as assessed by flow cytometry after treatment with vehicle, HER2-XPAT, or HER2-PAT. FIG. (D) shows percentage of “activated” (e.g. as measured by CD69+ expression) CD8+ cells in tumors as assessed by flow cytometry after treatment with vehicle, HER2-XPAT, or HER2-PAT.

[0072] FIGS. 14E-14H (FIGS. 14E-14H) illustrate minimal XPAT activation in the blood periphery in the same experimental setup as described in FIGS. 14A-14D above. For example, no appreciable level of activation of blood T cells was observed after treatment with XTENylated HER2-CD3 molecule (“HER2-XPAT”) or treatment with non-XTENylated HER2-CD3 molecule (“HER2-PAT”), as measured by CD25+ expression in CD4+ T cells (FIG. 14E), CD25+ expression in CD8+ T cells (FIG. 14F), CD69+ expression in CD4+ T cells (FIG. 14G), or CD69+ expression in CD8+ T cells (FIG. 14H) from humanized BT-474 xenograft mice.

[0073] FIG. 14I (FIG. 14I) illustrates representative levels of CD3+ T cells per mass of tumor after treatment with vehicle, HER2-XPAT, or HER2-PAT, as assessed by flow cytometry.

[0074] FIG. 14J (FIG. 14J) shows that an alternate dosing schedule of HER2-XPAT is effective at reducing tumor burden in humanized BT-474 xenograft mice.

[0075] FIG. 15 (FIG. 15) illustrates that XTENylation of a HER2-CD3 molecule decreases toxicity of the HER2-CD3 construct in cynomolgus monkeys. (A) shows schemes for maximum-tolerated dose trials of XTENylated (“HER2-XPAT”) or non-XTENylated (“HER2-PAT”) in monkeys. (B) shows plasma levels of XTENylated or non-XTENylated molecules post-dosing in monkeys, showing that the maximum tolerated dose of the XTENylated construct is >1000× the non-XTENylated molecules.

[0076] FIGS. 16A-16B (FIGS. 16A-16B) shows that in cynomolgus monkeys, HER2-XPAT constructs induce T cell margination at doses greater than 2.5 mpk, but fail to activate peripheral T cells at doses as high as 50 mpk. FIG. 16(A) shows effects on total lymphocytes, showing that XTENylated constructs induce reduction in total blood lymphocytes at doses greater than 2.5 mpk. FIG. 16(B) shows effects on activated CD4+ and CD8+ T cell populations (e.g., CD69+ or CD25+) for HER2-XPAT 2275 and the corresponding construct without any XTENs, showing that, for HER2-XPAT 2275, the post-dose effect on systemic T cell activation is within pre-dose ranges, while HER2-PAT induced CD25 expression on CD4+ and CD8+ T cells.

[0077] FIG. 17 (FIG. 17) illustrates that XTENyation of a HER2-CD3 molecule decreases cytokine release syndrome when the agent is administered in cynomolgus monkeys. (A), (B), and (C) show maximal concentrations of serum IL-6, TNFalpha, or IFNgamma induced by dose series of HER2-PAT or HER2-XPAT in cynomolgus monkeys, showing that HER2-XPAT does not induce appreciable cytokine release at tested doses.

### DETAILED DESCRIPTION OF THE INVENTION

[0078] While preferred embodiments of the present invention have been shown and described herein, it will be obvious to those skilled in the art that such embodiments are provided by way of example only. Numerous variations, changes, and substitutions will now occur to those skilled in the art without departing from the invention. It should be understood that various alternatives to the embodiments of the invention described herein may be employed in practicing the invention. It is intended that the following claims define the scope of the invention and that methods and structures within the scope of these claims and their equivalents be covered thereby.

[0079] Unless otherwise defined, all technical and scientific terms used herein have the same meaning as commonly understood by one of ordinary skill in the art to which this invention belongs. Although methods and materials similar or equivalent to those described herein can be used in the practice or testing of the present invention, suitable methods and materials are described below. In case of conflict, the patent specification, including definitions, will control. In addition, the materials, methods, and examples are illustrative only and not intended to be limiting. Numerous variations, changes, and substitutions will now occur to those skilled in the art without departing from the invention.

### Definitions

[0080] In the context of the present application, the following terms have the meanings ascribed to them unless specified otherwise:

[0081] As used throughout the specification and claims, the terms “a”, “an” and “the” are used in the sense that they mean “at least one”, “at least a first”, “one or more” or “a plurality” of the referenced components or steps, except in instances wherein an upper limit is thereafter specifically stated. Therefore, a “release segment”, as used herein, means “at least a first release segment” but includes a plurality of release segments. The operable limits and parameters of combinations, as with the amounts of any single agent, will be known to those of ordinary skill in the art in light of the present disclosure.

[0082] The terms “polypeptide,” “peptide,” and “protein” are used interchangeably herein to refer to polymers of amino acids of any length. The polymer may be linear or branched, it may comprise modified amino acids, and it may be interrupted by non-amino acids. The terms also encompass an amino acid polymer that has been modified, for example, by disulfide bond formation, glycosylation, lipidation, acetylation, phosphorylation, or any other manipulation, such as conjugation with a labeling component.

[0083] The term “monomeric” as applied to a polypeptide refers to the state of the polypeptide as being a single continuous amino acid sequence substantially unassociated with one or more additional polypeptides of the same or different sequence.

[0084] As used herein, the term “amino acid” refers to either natural and/or unnatural or synthetic amino acids, including but not limited to both the D or L optical isomers, and amino acid analogs and peptidomimetics. Standard single or three letter codes may be used to designate amino acids.

[0085] The term “natural L-amino acid” or “L-amino acid” means the L optical isomer forms of glycine (G), proline (P), alanine (A), valine (V), leucine (L), isoleucine (I), methionine (M), cysteine (C), phenylalanine (F), tyrosine (Y), tryptophan (W), histidine (H), lysine (K), arginine (R), glutamine (Q), asparagine (N), glutamic acid (E), aspartic acid (D), serine (S), and threonine (T).

[0086] The term “antibody” is used herein in the broadest sense and encompasses various antibody structures, including but not limited to monoclonal antibodies, polyclonal antibodies, multispecific antibodies (e.g., bispecific antibodies), nanobodies, VHH antibodies, and antibody fragments so long as they exhibit the desired antigen-binding activity or immunological activity. The term “immunoglobulin” (Ig) is used interchangeably with antibody herein. The full-length antibodies may be, for example, monoclonal, recombinant, chimeric, deimmunized, humanized and human antibodies. Antibodies represent a large family of molecules that include several types of molecules, such as IgD, IgG, IgA, IgM and IgE. The term “immunoglobulin molecule” includes, for example, hybrid antibodies, or altered antibodies, and fragments thereof. It has been shown that the antigen binding function of an antibody can be performed by fragments of a naturally-occurring antibody or monoclonal antibody.

[0087] A “humanized” antibody refers to a chimeric antibody comprising amino acid residues from non-human complementarity-determining regions (CDRs) and amino acid residues from human framework regions (FRs). In certain embodiments, a humanized antibody will comprise substantially all of at least one, and typically two, variable domains, in which all or substantially all of the CDRs correspond to those of a non-human antibody (which may include amino acid substitutions), and all or substantially all of the FRs correspond to those of a human antibody (which may include amino acid substitutions).

[0088] The term “monoclonal antibody” as used herein refers to an antibody obtained from a population of substantially homogeneous antibodies, i.e., the individual antibodies comprising the population are identical and/or bind the same epitope, except for possible variant antibodies, e.g., containing naturally occurring mutations or arising during production of a monoclonal antibody preparation, such variants generally being present in minor amounts. In contrast to polyclonal antibody preparations, which typically include different antibodies directed against different determinants (epitopes), each monoclonal antibody of a monoclonal antibody preparation is directed against a single determinant on an antigen. Thus, the modifier “monoclonal” indicates the character of the antibody as being obtained from a substantially homogeneous population of antibodies and is not to be construed as requiring production of the antibody by any particular method. For example, the monoclonal antibodies to be used in accordance with the present invention may be made by a variety of techniques, including but not limited to the hybridoma method, recombinant DNA methods, phage-display methods, and methods utilizing transgenic animals containing all or part of the human immunoglobulin loci, such methods and other exemplary methods for making monoclonal antibodies being known in the art or described herein.

[0089] An “antigen binding fragment” as used herein refers to an immunoglobulin molecule and immunologically active portions of immunoglobulin molecule, i.e., a molecule that contains an antigen-binding site which specifically binds (“immunoreacts with”) an antigen. Examples include but are not limited to Fv, Fab, Fab′, Fab′-SH, F(ab′)2, diabodies, linear antibodies (see U.S. Pat. No. 5,641,870), a single domain antibody, a single domain camelid antibody, single-chain fragment variable (scFv) antibody molecules, and multispecific antibodies formed from antibody fragments that retain the ability to specifically bind to antigen. Also encompassed within the term “antigen binding fragment” is any polypeptide chain-containing molecular structure that has a specific shape which fits to and recognizes and binds to an epitope, where one or more non-covalent binding interactions stabilize the complex between the molecular structure and the epitope. An antigen binding fragment “specifically binds to” or is “immunoreactive with” an antigen if it binds with greater affinity or avidity than it binds to other reference antigens including polypeptides or other substances.

[0090] “scFv” or “single chain fragment variable” are used interchangeably herein to refer to an antibody fragment format comprising variable regions of heavy (“VH”) and light (“VL”) chains or two copies of a VH or VL chain of an antibody, which are joined together by a short flexible peptide linker which enables the scFv to form the desired structure for antigen binding. The scFv is a fusion protein of the variable regions of the heavy (VH) and light chains (VL) of immunoglobulins and can be easily expressed in functional form in E. coli or other host cells.

[0091] “Diabodies” refers to small antibody fragments prepared by constructing scFv fragments with short linkers (about 5-10 residues) between the VH and VL domains such that inter-chain but not intra-chain pairing of the V domains is achieved, resulting in a bivalent fragment, i.e., fragment having two antigen-binding sites. Bispecific diabodies are heterodimers of two “crossover” scFv fragments in which the VH and VL domains of the two antibodies are present on different polypeptide chains. Diabodies are described more fully in, for example, U.S. Pat. No. 7,635,475.

[0092] The term “bispecific antigen-binding fragment” is to be understood as an antigen binding fragment that has binding specificities for at least two different antigens

[0093] The terms “antigen”, “target antigen” and “immunogen” are used interchangeably herein to refer to the structure or binding determinant that an antibody, antibody fragment or an antibody fragment-based molecule binds to or has specificity against. The target antigen may be polypeptide, carbohydrate, nucleic acid, lipid, hapten or other naturally occurring or synthetic compound or portions thereof. An antigen is also a ligand for those antibodies or antibody fragments that have binding affinity for the antigen. Non-limiting exemplary antigens included CD3, HER2, EGFR, and EpCAM (and portions thereof) from human, non-human primates, murine, and other homologues thereof.

[0094] The term “CD3 antigen binding fragment” refers to an antigen binding fragment that is capable of binding cluster of differentiation 3 (CD3) or a member of the CD3 complex with sufficient affinity such that the antigen binding fragment is useful as a diagnostic and/or therapeutic agent in targeting CD3.

[0095] A “target cell marker” refers to a molecule expressed by a target cell including but not limited to cell-surface receptors, antigens, glycoproteins, oligonucleotides, enzymatic substrates, antigenic determinants, or binding sites that may be present in or on the surface of a target tissue or cell that may serve as ligands for antibodies.

[0096] A “target tissue” or “target cell” refers to a tissue or cell that is the cause of or is part of a disease condition such as, but not limited to cancer or inflammatory conditions. Sources of diseased target tissue or cells include a body organ, a tumor, a cancerous cell or population of cancerous cells or cells that form a matrix or are found in association with a population of cancerous cells, bone, skin, cells that produce cytokines or factors contributing to a disease condition.

[0097] The term “epitope” refers to the particular site on an antigen molecule to which an antibody, antibody fragment, or binding domain binds. An epitope is a ligand of an antibody or antibody fragment.

[0098] “Affinity” refers to the strength of the sum total of noncovalent interactions between a single binding site of a molecule (e.g., an antibody) and its binding partner (e.g., an antigen). Unless indicated otherwise, as used herein, “binding affinity” refers to intrinsic binding affinity which reflects a 1:1 interaction between members of a binding pair (e.g., antibody and antigen). The affinity of a molecule X for its partner Y can generally be represented by the dissociation constant (K_{d}). As used herein “a greater binding affinity” means a lower K_{d} value; e.g., 1×10⁻⁹ M is a greater binding affinity than 1×10⁻⁸ M. An antibody which binds an antigen of interest, e.g., a tumor-associated target cell antigen, is one that binds the antigen with sufficient affinity such that the antibody is useful as a diagnostic and/or therapeutic agent in targeting a cell or tissue expressing the antigen and does not significantly cross-react with other proteins.

[0099] “Dissociation constant”, or “K_{d}”, are used interchangeably and refer to the affinity between a ligand “L” and a protein “P”; i.e. how tightly a ligand binds to a particular protein. It can be calculated using the formula K_{d}=[L][P]/[LP], where [P], [L] and [LP] represent molar concentrations of the protein, ligand and complex, respectively.

[0100] The term “hypervariable region,” “HVR,” or “CDR”, when used herein, interchangeably refer to the regions of an antibody variable domain which are hypervariable in sequence and/or form structurally defined loops, and/or are involved in antigen recognition. Generally, antibodies comprise six hypervariable regions; three in the VH (H1, H2, H3), and three in the VL (L1, L2, L3). A number of CDR delineations are in use and are encompassed herein; e.g., CDR-L1 refers to the first hypervariable CDR region of the light chain, CDR-H2 refers to the second hypervariable CDR region of the heavy chain, etc. The Kabat Complementarity Determining Regions (CDRs) are based on sequence variability and are the most commonly used (Kabat et al., Sequences of Proteins of Immunological Interest, 5th Ed. Public Health Service, National Institutes of Health, Bethesda, Md. (1991)).

[0101] “Framework” or “FR” residues are those variable domain residues in antigen binding fragments other than the hypervariable region residues as herein defined, and are generally located between or that flank CDR. A number of FR delineations are in use and are encompassed herein; e.g., FR-L1 refers to the first FR region of the light chain, FR-H2 refers to the second FR region of the heavy chain, etc.

[0102] “Isoelectric point” or “pI” are used interchangeably herein to refer to the pH at which a particular molecule carries no net electrical charge or is electrically neutral in the statistical mean. The standard nomenclature to represent the isoelectric point is pH, such that the units are pH units; e.g., an antigen binding fragment with a pI of 6.3 would have a neutral charge in solution at pH 6.3. The isoelectric point can be determined mathematically, including a number of algorithms for estimating isoelectric points of peptides and proteins; e.g., the Henderson-Hasselbalch equation with different pK values. The isoelectric point can also be determined experimentally by in vitro assays such as capillary electrophoresis focusing.

[0103] The term “release segment” or “RS” refers to a peptide in the subject compositions having one or more sites within the sequence that can be recognized and cleaved by one or more proteases, effecting release of the antigen binding fragments and XTEN from the composition. As used herein, “mammalian protease” means a protease that normally exists in the body fluids, cells, tissues, and may be found in higher levels in certain target tissues or cells, e.g., in diseased tissues (e.g., tumor) of a mammal. RS sequences can be engineered to be cleaved by various mammalian proteases or multiple mammalian proteases that are present in or proximal to target tissues in a subject or are introduced in an in vitro assay. Other equivalent proteases (endogenous or exogenous) that are capable of recognizing a defined cleavage site can be utilized. It is specifically contemplated that the RS sequence can be adjusted and tailored to the protease utilized and can incorporate linker amino acids to join to adjacent polypeptides

[0104] The term “cleavage site” refers to that location between adjacent amino acids in a peptide or polypeptide that can be broken or cleaved by enzymes such as proteases; the breaking of the peptide bonds between the adjacent amino acids.

[0105] The term “within”, when referring to a first polypeptide being linked to a second polypeptide, encompasses linking or fusion of an additional component that connects the N-terminus of the first or second polypeptide to the C-terminus of the second or first polypeptide, respectively, as well as insertion of the first polypeptide into the sequence of the second polypeptide. For example, when an RS component is linked “within” a chimeric polypeptide assembly, the RS may be linked to the N-terminus, the C-terminus, or may be inserted between any two amino acids of an XTEN polypeptide.

[0106] “Activity” as applied to form(s) of a composition provided herein, refers to an action or effect, including but not limited to antigen binding, antagonist activity, agonist activity, a cellular or physiologic response, cell lysis, cell death, or an effect generally known in the art for the effector component of the composition, whether measured by an in vitro, ex vivo or in vivo assay or a clinical effect.

[0107] “Effector cell”, as used herein, includes any eukaryotic cells capable of conferring an effect on a target cell. For example, an effector cell can induce loss of membrane integrity, pyknosis, karyorrhexis, apoptosis, lysis, and/or death of a target cell. In another example, an effector cell can induce division, growth, differentiation of a target cell or otherwise altering signal transduction of a target cell. Non-limiting examples of effector cells include plasma cell, T cell, CD4 cell, CD8 cell, B cell, cytokine induced killer cell (CIK cell), master cell, dendritic cell, regulatory T cell (RegT cell), helper T cell, myeloid cell, macrophage, and NK cell.

[0108] An “effector cell antigen” refers to molecules expressed by an effector cell, including without limitation cell surface molecules such as proteins, glycoproteins or lipoproteins. Exemplary effector cell antigens include proteins of the CD3 complex or the T cell receptor (TCR), CD4, CD8, CD25, CD38, CD69, CD45RO, CD57, CD95, CD107, and CD154, as well as effector molecules such as cytokines in association with, bound to, expressed within, or expressed and released by, an effector cell. An effector cell antigen can serve as the binding counterpart of a binding domain of the subject chimeric polypeptide assembly.

[0109] As used herein, “CD3” or “cluster of differentiation 3” means the T cell surface antigen CD3 complex, which includes in individual form or independently combined form all known CD3 subunits, for example CD3 epsilon, CD3 delta, CD3 gamma, CD3 zeta, CD3 alpha and CD3 beta. The extracellular domains of CD3 epsilon, gamma and delta contain an immunoglobulin-like domain, so are therefore considered part of the immunoglobulin superfamily. CD3 includes, for example, human CD3 epsilon protein (NCBI RefSeq No. NP_000724), which is 207 amino acids in length, and human CD3 gamma protein (NCBI RefSeq No. NP_000064), which is 182 amino acids in length.

[0110] As used herein, the term “ELISA” refers to an enzyme-linked immunosorbent assay as described herein or as otherwise known in the art.

[0111] A “host cell” includes an individual cell or cell culture which can be or has been a recipient for the subject vectors into which exogenous nucleic acid has been introduced, such as those described herein. Host cells include progeny of a single host cell. The progeny may not necessarily be completely identical (in morphology or in genomic of total DNA complement) to the original parent cell due to natural, accidental, or deliberate mutation. A host cell includes cells transfected in vivo with a vector of this invention.

[0112] “Isolated,” when used to describe the various polypeptides disclosed herein, means a polypeptide that has been identified and separated and/or recovered from a component of its natural environment or from a more complex mixture (such as during protein purification). Contaminant components of its natural environment are materials that would typically interfere with diagnostic or therapeutic uses for the polypeptide, and may include enzymes, hormones, and other proteinaceous or non-proteinaceous solutes. As is apparent to those of skill in the art, a non-naturally occurring polynucleotide, peptide, polypeptide, protein, antibody, or fragments thereof, does not require “isolation” to distinguish it from its naturally occurring counterpart. In addition, a “concentrated”, “separated” or “diluted” polynucleotide, peptide, polypeptide, protein, antibody, or fragments thereof, is distinguishable from its naturally occurring counterpart in that the concentration or number of molecules per volume is generally greater than that of its naturally occurring counterpart. In general, a polypeptide made by recombinant means and expressed in a host cell is considered to be “isolated.”

[0113] An “isolated nucleic acid” is a nucleic acid molecule that is identified and separated from at least one contaminant nucleic acid molecule with which it is ordinarily associated in the natural source of the polypeptide-encoding nucleic acid. For example, an isolated polypeptide-encoding nucleic acid molecule is other than in the form or setting in which it is found in nature. Isolated polypeptide-encoding nucleic acid molecules therefore are distinguished from the specific polypeptide-encoding nucleic acid molecule as it exists in natural cells. However, an isolated polypeptide-encoding nucleic acid molecule includes polypeptide-encoding nucleic acid molecules contained in cells that ordinarily express the polypeptide where, for example, the nucleic acid molecule is in a chromosomal or extra-chromosomal location different from that of natural cells.

[0114] A “chimeric” protein or polypeptide contains at least one fusion polypeptide comprising at least one region in a different position in the sequence than that which occurs in nature. The regions may normally exist in separate proteins and are brought together in the fusion polypeptide; or they may normally exist in the same protein but are placed in a new arrangement in the fusion polypeptide. A chimeric protein may be created, for example, by chemical synthesis, or by creating and translating a polynucleotide in which the peptide regions are encoded in the desired relationship.

[0115] “Fused,” and “fusion” are used interchangeably herein, and refers to the joining together of two or more peptide or polypeptide sequences by recombinant means. A “fusion protein” or “chimeric protein” comprises a first amino acid sequence linked to a second amino acid sequence with which it is not naturally linked in nature.

[0116] “XTENylated” is used to denote a peptide or polypeptide that has been modified by the linking or fusion of one or more XTEN polypeptides (described, below) to the peptide or polypeptide, whether by recombinant or chemical cross-linking means.

[0117] “Operably linked” means that the DNA sequences being linked are in reading phase or in-frame. An “in-frame fusion” refers to the joining of two or more open reading frames (ORFs) to form a continuous longer ORF, in a manner that maintains the correct reading frame of the original ORFs. For example, a promoter or enhancer is operably linked to a coding sequence for a polypeptide if it affects the transcription of the polypeptide sequence. Thus, the resulting recombinant fusion protein is a single protein containing two or more segments that correspond to polypeptides encoded by the original ORFs (which segments are not normally so joined in nature).

[0118] In the context of polypeptides, a “linear sequence” or a “sequence” is an order of amino acids in a polypeptide in an amino to carboxyl terminus (N- to C-terminus) direction in which residues that neighbor each other in the sequence are contiguous in the primary structure of the polypeptide. A “partial sequence” is a linear sequence of part of a polypeptide that is known to comprise additional residues in one or both directions.

[0119] “Heterologous” means derived from a genotypically distinct entity from the rest of the entity to which it is being compared. For example, a glycine-rich sequence removed from its native coding sequence and operatively linked to a coding sequence other than the native sequence is a heterologous glycine-rich sequence. The term “heterologous” as applied to a polynucleotide, a polypeptide, means that the polynucleotide or polypeptide is derived from a genotypically distinct entity from that of the rest of the entity to which it is being compared.

[0120] The terms “polynucleotides”, “nucleic acids”, “nucleotides,” and “oligonucleotides” are used interchangeably. They refer to nucleotides of any length, encompassing a singular nucleic acid as well as plural nucleic acids, either deoxyribonucleotides or ribonucleotides, or analogs thereof. Polynucleotides may have any three-dimensional structure, and may perform any function, known or unknown. The following are non-limiting examples of polynucleotides: coding or non-coding regions of a gene or gene fragment, loci (locus) defined from linkage analysis, exons, introns, messenger RNA (mRNA), transfer RNA, ribosomal RNA, ribozymes, cDNA, recombinant polynucleotides, branched polynucleotides, plasmids, vectors, isolated DNA of any sequence, isolated RNA of any sequence, nucleic acid probes, and primers. A polynucleotide may comprise modified nucleotides, such as methylated nucleotides and nucleotide analogs. If present, modifications to the nucleotide structure may be imparted before or after assembly of the polymer. The sequence of nucleotides may be interrupted by non-nucleotide components. A polynucleotide may be further modified after polymerization, such as by conjugation with a labeling component.

[0121] The term “complement of a polynucleotide” denotes a polynucleotide molecule having a complementary base sequence and reverse orientation as compared to a reference sequence, such that it could hybridize with a reference sequence with complete fidelity.

[0122] “Recombinant” as applied to a polynucleotide means that the polynucleotide is the product of various combinations of recombination steps which may include cloning, restriction and/or ligation steps, and other procedures that result in expression of a recombinant protein in a host cell.

[0123] The terms “gene” and “gene fragment” are used interchangeably herein. They refer to a polynucleotide containing at least one open reading frame that is capable of encoding a particular protein after being transcribed and translated. A gene or gene fragment may be genomic or cDNA, as long as the polynucleotide contains at least one open reading frame, which may cover the entire coding region or a segment thereof. A “fusion gene” is a gene composed of at least two heterologous polynucleotides that are linked together.

[0124] As used herein, a “coding region” or “coding sequence” is a portion of polynucleotide which consists of codons translatable into amino acids. Although a “stop codon” (TAG, TGA, or TAA) is typically not translated into an amino acid, it may be considered to be part of a coding region, but any flanking sequences, for example promoters, ribosome binding sites, transcriptional terminators, introns, and the like, are not part of a coding region. The boundaries of a coding region are typically determined by a start codon at the 5′ terminus, encoding the amino terminus of the resultant polypeptide, and a translation stop codon at the 3′ terminus, encoding the carboxyl terminus of the resulting polypeptide. Two or more coding regions of the present invention can be present in a single polynucleotide construct, e.g., on a single vector, or in separate polynucleotide constructs, e.g., on separate (different) vectors. It follows, then, that a single vector can contain just a single coding region, or comprise two or more coding regions, e.g., a single vector can separately encode a binding domain-A and a binding domain-B as described below. In addition, a vector, polynucleotide, or nucleic acid of the invention can encode heterologous coding regions, either fused or unfused to a nucleic acid encoding a binding domain of the invention. Heterologous coding regions include without limitation specialized elements or motifs, such as a secretory signal peptide or a heterologous functional domain.

[0125] The term “downstream” refers to a nucleotide sequence that is located 3′ to a reference nucleotide sequence. In certain embodiments, downstream nucleotide sequences relate to sequences that follow the starting point of transcription. For example, the translation initiation codon of a gene is located downstream of the start site of transcription.

[0126] The term “upstream” refers to a nucleotide sequence that is located 5′ to a reference nucleotide sequence. In certain embodiments, upstream nucleotide sequences relate to sequences that are located on the 5′ side of a coding region or starting point of transcription. For example, most promoters are located upstream of the start site of transcription.

[0127] “Homology” or “homologous” refers to sequence similarity or interchangeability between two or more polynucleotide sequences or between two or more polypeptide sequences. When using a program such as BestFit to determine sequence identity, similarity or homology between two different amino acid sequences, the default settings may be used, or an appropriate scoring matrix, such as blosum45 or blosum80, may be selected to optimize identity, similarity or homology scores. Preferably, polynucleotides that are homologous are those which hybridize under stringent conditions as defined herein and have at least 70%, preferably at least 80%, more preferably at least 90%, more preferably 95%, more preferably 97%, more preferably 98%, and even more preferably 99% sequence identity compared to those sequences. Polypeptides that are homologous preferably have sequence identities that are at least 70%, preferably at least 80%, even more preferably at least 90%, even more preferably at least 95-99% identical when optimally aligned over sequences of comparable length.

[0128] “Ligation” as applied to polynucleic acids refers to the process of forming phosphodiester bonds between two nucleic acid fragments or genes, linking them together. To ligate the DNA fragments or genes together, the ends of the DNA must be compatible with each other. In some cases, the ends will be directly compatible after endonuclease digestion. However, it may be necessary to first convert the staggered ends commonly produced after endonuclease digestion to blunt ends to make them compatible for ligation.

[0129] The terms “stringent conditions” or “stringent hybridization conditions” include reference to conditions under which a polynucleotide will hybridize to its target sequence, to a detectably greater degree than other sequences (e.g., at least 2-fold over background). Generally, stringency of hybridization is expressed, in part, with reference to the temperature and salt concentration under which the wash step is carried out. Typically, stringent conditions will be those in which the salt concentration is less than about 1.5 M Na ion, typically about 0.01 to 1.0 M Na ion concentration (or other salts) at pH 7.0 to 8.3 and the temperature is at least about 30° C. for short polynucleotides (e.g., 10 to 50 nucleotides) and at least about 60° C. for long polynucleotides (e.g., greater than 50 nucleotides)—for example, “stringent conditions” can include hybridization in 50% formamide, 1 M NaCl, 1% SDS at 37° C., and three washes for 15 min each in 0.1×SSC/1% SDS at 60° C. to 65° C. Alternatively, temperatures of about 65° C., 60° C., 55° C., or 42° C. may be used. SSC concentration may be varied from about 0.1 to 2×SSC, with SDS being present at about 0.1%. Such wash temperatures are typically selected to be about 5° C. to 20° C. lower than the thermal melting point for the specific sequence at a defined ionic strength and pH. The Tm is the temperature (under defined ionic strength and pH) at which 50% of the target sequence hybridizes to a perfectly matched probe. An equation for calculating Tm and conditions for nucleic acid hybridization are well known and can be found in Sambrook, J. et al., “Molecular Cloning: A Laboratory Manual,” 3^{rd} edition, Cold Spring Harbor Laboratory Press, 2001. Typically, blocking reagents are used to block non-specific hybridization. Such blocking reagents include, for instance, sheared and denatured salmon sperm DNA at about 100-200 μg/ml. Organic solvent, such as formamide at a concentration of about 35-50% v/v, may also be used under particular circumstances, such as for RNA:DNA hybridizations. Useful variations on these wash conditions will be readily apparent to those of ordinary skill in the art.

[0130] The terms “percent identity,” percentage of sequence identity,” and “% identity,” as applied to polynucleotide sequences, refer to the percentage of residue matches between at least two polynucleotide sequences aligned using a standardized algorithm. Such an algorithm may insert, in a standardized and reproducible way, gaps in the sequences being compared in order to optimize alignment between two sequences, and therefore achieve a more meaningful comparison of the two sequences. Percent identity may be measured over the length of an entire defined polynucleotide sequence, or may be measured over a shorter length, for example, over the length of a fragment taken from a larger, defined polynucleotide sequence, for instance, a fragment of at least 45, at least 60, at least 90, at least 120, at least 150, at least 210 or at least 450 contiguous residues. Such lengths are exemplary only, and it is understood that any fragment length supported by the sequences shown herein, in the tables, figures or Sequence Listing, may be used to describe a length over which percentage identity may be measured. The percentage of sequence identity is calculated by comparing two optimally aligned sequences over the window of comparison, determining the number of matched positions (at which identical residues occur in both polypeptide sequences), dividing the number of matched positions by the total number of positions in the window of comparison (i.e., the window size), and multiplying the result by 100 to yield the percentage of sequence identity. When sequences of different length are to be compared, the shortest sequence defines the length of the window of comparison. Conservative substitutions are not considered when calculating sequence identity.

[0131] The terms “percent identity,” percentage of sequence identity,” and “% identity,” with respect to the polypeptide sequences identified herein, is defined as the percentage of amino acid residues in a query sequence that are identical with the amino acid residues of a second, reference polypeptide sequence of comparable length or a portion thereof, after aligning the sequences and introducing gaps, if necessary, to achieve the maximum percent sequence identity, and not considering any conservative substitutions as part of the sequence identity, thereby resulting in optimal alignment. Alignment for purposes of determining percent amino acid sequence identity can be achieved in various ways that are within the skill in the art, for instance, using publicly available computer software such as BLAST, BLAST-2, ALIGN or Megalign (DNASTAR) software. Those skilled in the art can determine appropriate parameters for measuring alignment, including any algorithms needed to achieve optimal alignment over the full length of the sequences being compared. Percent identity may be measured over the length of an entire defined polypeptide sequence, or may be measured over a shorter length, for example, over the length of a fragment taken from a larger, defined polypeptide sequence, for instance, a fragment of at least 10, at least 15, at least 20, at least 30, at least 40, at least 50, at least 70 or at least 150 contiguous residues. Such lengths are exemplary only, and it is understood that any fragment length supported by the sequences shown herein, in the tables, figures or Sequence Listing, may be used to describe a length over which percentage identity may be measured.

[0132] “Repetitiveness” used in the context of polynucleotide sequences refers to the degree of internal homology in the sequence such as, for example, the frequency of identical nucleotide sequences of a given length. Repetitiveness can, for example, be measured by analyzing the frequency of identical sequences.

[0133] The term “expression” as used herein refers to a process by which a polynucleotide produces a gene product, for example, an RNA or a polypeptide. It includes without limitation transcription of the polynucleotide into messenger RNA (mRNA), transfer RNA (tRNA), small hairpin RNA (shRNA), small interfering RNA (siRNA) or any other RNA product, and the translation of an mRNA into a polypeptide. Expression produces a “gene product.” As used herein, a gene product can be either a nucleic acid, e.g., a messenger RNA produced by transcription of a gene, or a polypeptide which is translated from a transcript. Gene products described herein further include nucleic acids with post transcriptional modifications, e.g., polyadenylation or splicing, or polypeptides with post translational modifications, e.g., methylation, glycosylation, the addition of lipids, association with other protein subunits, or proteolytic cleavage.

[0134] A “vector” or “expression vector” are used interchangeably and refers to a nucleic acid molecule, preferably self-replicating in an appropriate host, which transfers an inserted nucleic acid molecule into and/or between host cells. The term includes vectors that function primarily for insertion of DNA or RNA into a cell, replication of vectors that function primarily for the replication of DNA or RNA, and expression vectors that function for transcription and/or translation of the DNA or RNA. Also included are vectors that provide more than one of the above functions. An “expression vector” is a polynucleotide which, when introduced into an appropriate host cell, can be transcribed and translated into a polypeptide(s). An “expression system” usually connotes a suitable host cell comprised of an expression vector that can function to yield a desired expression product.

[0135] “Serum degradation resistance,” as applied to a polypeptide, refers to the ability of the polypeptides to withstand degradation in blood or components thereof, which typically involves proteases in the serum or plasma. The serum degradation resistance can be measured by combining the protein with human (or mouse, rat, dog, monkey, as appropriate) serum or plasma, typically for a range of days (e.g. 0.25, 0.5, 1, 2, 4, 8, 16 days), typically at about 37° C. The samples for these time points can be run on a Western blot assay and the protein is detected with an antibody. The antibody can be to a tag in the protein. If the protein shows a single band on the western, where the protein's size is identical to that of the injected protein, then no degradation has occurred. In this exemplary method, the time point where 50% of the protein is degraded, as judged by Western blots or equivalent techniques, is the serum degradation half-life or “serum half-life” of the protein.

[0136] The terms “t_{1/2}”, “half-life”, “terminal half-life”, “elimination half-life” and “circulating half-life” are used interchangeably herein and, as used herein means the terminal half-life calculated as ln(2)/Kₑ₁. Kₑ₁ is the terminal elimination rate constant calculated by linear regression of the terminal linear portion of the log concentration vs. time curve. Half-life typically refers to the time required for half the quantity of an administered substance deposited in a living organism to be metabolized or eliminated by normal biological processes. When a clearance curve of a given polypeptide is constructed as a function of time, the curve is usually biphasic with a rapid α-phase and longer β-phase. The typical β-phase half-life of a human antibody in humans is 21 days. Half-life can be measured using timed samples from anybody fluid but is most typically measured in plasma samples.

[0137] The term “molecular weight” generally refers to the sum of atomic weights of the constituent atoms in a molecule. Molecular weight can be determined theoretically by summing the atomic masses of the constituent atoms in a molecule. When applied in the context of a polypeptide, the molecular weight is calculated by adding, based on amino acid composition, the molecular weight of each type of amino acid in the composition or by estimation from comparison to molecular weight standards in an SDS electrophoresis gel. The calculated molecular weight of a molecule can differ from the “apparent molecular weight” of a molecule, which generally refers to the molecular weight of a molecule as determined by one or more analytical techniques. “Apparent molecular weight factor” and “apparent molecular weight” are related terms and when used in the context of a polypeptide, the terms refer to a measure of the relative increase or decrease in apparent molecular weight exhibited by a particular amino acid or polypeptide sequence. The apparent molecular weight can be determined, for example, using size exclusion chromatography (SEC) or similar methods by comparing to globular protein standards, as measured in “apparent kD” units. The apparent molecular weight factor is the ratio between the apparent molecular weight and the “molecular weight”; the latter is calculated by adding, based on amino acid composition as described above, or by estimation from comparison to molecular weight standards in an SDS electrophoresis gel. The determination of apparent molecular weight and apparent molecular weight factor is described in U.S. Pat. No. 8,673,860.

[0138] A “defined medium” refers to a medium comprising nutritional and hormonal requirements necessary for the survival and/or growth of the cells in culture such that the components of the medium are known. Traditionally, the defined medium has been formulated by the addition of nutritional and growth factors necessary for growth and/or survival. Typically, the defined medium provides at least one component from one or more of the following categories: a) all essential amino acids, and usually the basic set of twenty amino acids plus cysteine; b) an energy source, usually in the form of a carbohydrate such as glucose; c) vitamins and/or other organic compounds required at low concentrations; d) free fatty acids; and e) trace elements, where trace elements are defined as inorganic compounds or naturally occurring elements that are typically required at very low concentrations, usually in the micromolar range. The defined medium may also optionally be supplemented with one or more components from any of the following categories: a) one or more mitogenic agents; b) salts and buffers as, for example, calcium, magnesium, and phosphate; c) nucleosides and bases such as, for example, adenosine and thymidine, hypoxanthine; and d) protein and tissue hydrolysates.

[0139] The term “agonist” is used in the broadest sense and includes any molecule that mimics a biological activity of a native polypeptide disclosed herein. Suitable agonist molecules specifically include agonist antibodies or antibody fragments, fragments or amino acid sequence variants of native polypeptides, peptides, small organic molecules, etc. Methods for identifying agonists of a native polypeptide may comprise contacting a native polypeptide with a candidate agonist molecule and measuring a detectable change in one or more biological activities normally associated with the native polypeptide.

[0140] As used herein, “treatment” or “treating,” or “palliating,” or “ameliorating” are used interchangeably herein. These terms refer to an approach for obtaining beneficial or desired results including but not limited to a therapeutic benefit and/or a prophylactic benefit. By therapeutic benefit is meant eradication or amelioration of the underlying disorder being treated. Also, a therapeutic benefit is achieved with the eradication or amelioration of one or more of the physiological symptoms or improvement in one or more clinical parameters associated with the underlying disorder such that an improvement is observed in the subject, notwithstanding that the subject may still be afflicted with the underlying disorder. For prophylactic benefit, the compositions may be administered to a subject at risk of developing a particular disease, or to a subject reporting one or more of the physiological symptoms of a disease, even though a diagnosis of this disease may not have been made.

[0141] A “therapeutic effect” or “therapeutic benefit,” as used herein, refers to a physiologic effect, including but not limited to the mitigation, amelioration, or prevention of disease or an improvement in one or more clinical parameters associated with the underlying disorder in a subject, or to otherwise enhance physical or mental wellbeing of a subject, resulting from administration of a polypeptide of the invention other than the ability to induce the production of an antibody against an antigenic epitope possessed by the biologically active protein. For prophylactic benefit, the compositions may be administered to a subject at risk of developing a particular disease, a recurrence of a former disease, condition or symptom of the disease, or to a subject reporting one or more of the physiological symptoms of a disease, even though a diagnosis of this disease may not have been made.

[0142] The terms “therapeutically effective amount” and “therapeutically effective dose”, as used herein, refer to an amount of a drug or a biologically active protein, either alone or as a part of a composition, that is capable of having any detectable, beneficial effect on any symptom, aspect, measured parameter or characteristics of a disease state or condition when administered in one or repeated doses to a subject. Such effect need not be absolute to be beneficial. Determination of a therapeutically effective amount is well within the capability of those skilled in the art, especially in light of the detailed disclosure provided herein.

[0143] The term “therapeutically effective and non-toxic dose” as used herein refers to a tolerable dose of the compositions as defined herein that is high enough to cause depletion of tumor or cancer cells, tumor elimination, tumor shrinkage or stabilization of disease without or essentially without major toxic effects in the subject. Such therapeutically effective and non-toxic doses may be determined by dose escalation studies described in the art and should be below the dose inducing severe adverse side effects.

[0144] The term “therapeutic index”, as used herein, refers to the ratio of the blood concentration at which a drug becomes toxic and the concentration at which the drug is effective. One exemplary ratio of therapeutic index is LD₅₀:ED₅₀, wherein LD₅₀ is the dose resulting in 50% mortality in a populations of subjects and ED₅₀ is the dose resulting in effectiveness in a population of subjects.

[0145] The term “dose regimen”, as used herein, refers to a schedule for consecutively administered multiple doses (i.e., at least two or more) of a composition, wherein the doses are given in therapeutically effective amounts to result in sustained beneficial effect on any symptom, aspect, measured parameter, endpoint, or characteristic of a disease state or condition in a subject.

[0146] As used herein, “administering” is meant a method of giving a dosage of a compound (e.g., an anti-CD3 antibody of the invention) or a composition (e.g., a pharmaceutical composition including an anti-CD3 antibody of the invention) to a subject.

[0147] A “subject” is a mammal. Mammals include, but are not limited to, domesticated animals (e.g., cows, sheep, cats, dogs, and horses), primates (e.g., humans and non-human primates such as monkeys), rabbits, and rodents (e.g., mice and rats). In certain embodiments, the subject or individual is a human.

[0148] The terms “cancer” and “cancerous” refer to or describe the physiological condition in mammals that is typically characterized by unregulated cell growth/proliferation. Examples of cancer include, but are not limited to, carcinomas, Hodgkin's lymphoma, non-Hodgkin's lymphoma, B cell lymphoma, T-cell lymphoma, follicular lymphoma, mantle cell lymphoma, blastoma, breast cancer, colon cancer, prostate cancer, head and neck cancer, any form of skin cancer, melanoma, genito-urinary tract cancer, ovarian cancer, ovarian cancer with malignant ascites, peritoneal carcinomatosis, uterine serous carcinoma, endometrial cancer, cervical cancer, colorectal cancer, an epithelia intraperitoneal malignancy with malignant ascites, uterine cancer, mesothelioma in the peritoneum kidney cancers, lung cancer, small-cell lung cancer, non-small cell lung cancer, gastric cancer, esophageal cancer, stomach cancer, small intestine cancer, liver cancer, hepatocarcinoma, hepatoblastoma, liposarcoma, pancreatic cancer, gall bladder cancer, cancers of the bile duct, salivary gland carcinoma, thyroid cancer, epithelial cancer, adenocarcinoma, sarcomas of any origin, primary hematologic malignancies including acute or chronic lymphocytic leukemias, acute or chronic myelogenous leukemias, myeloproliferative neoplastic disorders, or myelodysplastic disorders, myasthenia gravis, Morbus Basedow, Hashimoto thyroiditis, or Goodpasture syndrome.

[0149] “Tumor,” as used herein, refers to all neoplastic cell growth and proliferation, whether malignant or benign, and all pre-cancerous and cancerous cells and tissues. The terms “cancer”, “cancerous”, “cell proliferative disorder”, “proliferative disorder,” and “tumor” are not mutually exclusive as used herein.

[0150] “Tumor-specific marker” as used herein, refers to an antigen that is found on or in a cancer cell that may be, but is not necessarily, found in higher numbers in or on the cancer cell relative to normal cells or tissues.

### I). General Techniques

[0151] The practice of the present invention employs, unless otherwise indicated, conventional techniques of immunology, biochemistry, chemistry, molecular biology, microbiology, cell biology, genomics and recombinant DNA, which are within the skill of the art. See Sambrook, J. et al., “Molecular Cloning: A Laboratory Manual,” 3^{rd} edition, Cold Spring Harbor Laboratory Press, 2001; “Current protocols in molecular biology”, F. M. Ausubel, et al. eds., 1987; the series “Methods in Enzymology,” Academic Press, San Diego, Calif.; “PCR 2: a practical approach”, M. J. MacPherson, B. D. Hames and G. R. Taylor eds., Oxford University Press, 1995; “Antibodies, a laboratory manual” Harlow, E. and Lane, D. eds., Cold Spring Harbor Laboratory, 1988; “Goodman & Gilman's The Pharmacological Basis of Therapeutics,” 11th Edition, McGraw-Hill, 2005; and Freshney, R.I., “Culture of Animal Cells: A Manual of Basic Technique,” 4th edition, John Wiley & Sons, Somerset, N J, 2000, the contents of which are incorporated in their entirety herein by reference.

[0152] Host cells can be cultured in a variety of media. Commercially available media such as Ham's F10 (Sigma), Minimal Essential Medium (MEM, Sigma), RPMI-1640 (Sigma), and Dulbecco's Modified Eagle's Medium (DMEM, Sigma) are suitable for culturing eukaryotic cells. In addition, animal cells can be grown in a defined medium that lacks serum but is supplemented with hormones, growth factors or any other factors necessary for the survival and/or growth of a particular cell type. Whereas a defined medium supporting cell survival maintains the viability, morphology, capacity to metabolize and potentially, capacity of the cell to differentiate, a defined medium promoting cell growth provides all chemicals necessary for cell proliferation or multiplication. The general parameters governing mammalian cell survival and growth in vitro are well established in the art. Physicochemical parameters which may be controlled in different cell culture systems are, e.g., pH, pO₂, temperature, and osmolarity. The nutritional requirements of cells are usually provided in standard media formulations developed to provide an optimal environment. Nutrients can be divided into several categories: amino acids and their derivatives, carbohydrates, sugars, fatty acids, complex lipids, nucleic acid derivatives and vitamins. Apart from nutrients for maintaining cell metabolism, most cells also require one or more hormones from at least one of the following groups: steroids, prostaglandins, growth factors, pituitary hormones, and peptide hormones to proliferate in serum-free media (Sato, G. H., et al. in “Growth of Cells in Hormonally Defined Media”, Cold Spring Harbor Press, N.Y., 1982). In addition to hormones, cells may require transport proteins such as transferrin (plasma iron transport protein), ceruloplasmin (a copper transport protein), and high-density lipoprotein (a lipid carrier) for survival and growth in vitro. The set of optimal hormones or transport proteins will vary for each cell type. Most of these hormones or transport proteins have been added exogenously or, in a rare case, a mutant cell line has been found which does not require a particular factor. Those skilled in the art will know of other factors required for maintaining a cell culture without undue experimentation.

[0153] Growth media for growth of prokaryotic host cells include nutrient broths (liquid nutrient medium) or LB medium (Luria Bertani). Suitable media include defined and undefined media. In general, media contains a carbon source such as glucose needed for bacterial growth, water, and salts. Media may also include a source of amino acids and nitrogen, for example beef or yeast extract (in an undefined medium) or known quantities of amino acids (in a defined medium). In some embodiments, the growth medium is LB broth, for example LB Miller broth or LB Lennox broth. LB broth comprises peptone (enzymatic digestion product of casein), yeast extract and sodium chloride. In some embodiments, a selective medium is used which comprises an antibiotic. In this medium, only the desired cells possessing resistance to the antibiotic will grow.

### II). CD3 Antigen Binding Fragment Compositions

[0154] In a first aspect, the disclosure provides polypeptides comprising an antigen binding fragment (AF1) having specific binding affinity for an effector cell antigen expressed on the surface of an effector cell selected from a plasma cell, a T cell, a B cell, a cytokine induced killer cell (CIK cell), a mast cell, a dendritic cell, a regulatory T cell (RegT cell), a helper T cell, a myeloid cell, and a NK cell. In one embodiment, the antigen binding fragment has binding affinity for an effector cell antigen expressed on the surface of a T cell. In another embodiment, the present disclosure provides polypeptides comprising antigen binding fragment having binding affinity for CD3. In another embodiment, the antigen binding fragment has binding affinity for a member of the CD3 complex, which includes in individual form or independently combined form all known CD3 subunits of the CD3 complex; for example, CD3 epsilon, CD3 delta, CD3 gamma, CD3 zeta, CD3 alpha and CD3 beta.

[0155] The antigen binding fragments that bind CD3 antigens have particular utility for pairing with a second antigen binding fragment (AF2) with binding affinity to a target cell marker or antigen of a diseased cell or tissue in composition formats in order to effect cell killing of the diseased cell or tissue. Binding specificity can be determined by complementarity determining regions, or CDRs, such as light chain CDRs or heavy chain CDRs. In many cases, binding specificity is determined by light chain CDRs and heavy chain CDRs. A given combination of heavy chain CDRs and light chain CDRs provides a given binding pocket that confers greater affinity and/or specificity towards CD3 as compared to other reference antigens.

[0156] The origin of the antigen binding fragments contemplated by the disclosure can be derived from a naturally occurring antibody or fragment thereof, a non-naturally occurring antibody or fragment thereof, a humanized antibody or fragment thereof, a synthetic antibody or fragment thereof, a hybrid antibody or fragment thereof, or an engineered antibody or fragment thereof. Methods for generating an antibody for a given target marker are well known in the art. For example, the monoclonal antibodies may be made using the hybridoma method described by Kohler et al., Nature, 256:495 (1975), or may be made by recombinant DNA methods (U.S. Pat. No. 4,816,567). The structure of antibodies and fragments thereof, variable regions of heavy and light chains of an antibody (VH and VL), single chain variable regions (scFv), complementarity determining regions (CDR), and domain antibodies (dAbs) are well understood. Methods for generating a polypeptide having a desired antigen binding fragment of a target cell marker are known in the art.

[0157] Certain CD3 binding antigen binding fragments of the disclosure have been specifically modified to enhance their stability in the polypeptide embodiments described herein relative to CD3 antibodies and antigen binding fragments known in the art. Protein aggregation of monoclonal and other antibodies continues to be a significant problem in their developability and remains a major area of focus in antibody production. Antibody aggregation can be triggered by partial unfolding of its domains, leading to monomer-monomer association followed by nucleation and aggregate growth. Although the aggregation propensities of antibodies and antibody-based proteins can be affected by the external experimental conditions, they are strongly dependent on the intrinsic antibody properties as determined by their sequences and structures. Although it is well known that proteins are only marginally stable in their folded states, it is often less well appreciated that most proteins are inherently aggregation-prone in their unfolded or partially unfolded states, and the resulting aggregates can be extremely stable and long-lived. Reduction in aggregation propensity has also been shown to be accompanied by an increase in expression titer, showing that reducing protein aggregation is beneficial throughout the development process and can lead to a more efficient path to clinical studies. For therapeutic proteins, aggregates are a significant risk factor for deleterious immune responses in patients and can form via a variety of mechanisms. Controlling aggregation can improve protein stability, manufacturability, attrition rates, safety, formulation, titers, immunogenicity, and solubility. The intrinsic properties of proteins such as size, hydrophobicity, electrostatics, and charge distribution play important roles in protein solubility. Low solubility of therapeutic proteins due to surface hydrophobicity has been shown to render formulation development more difficult and may lead to poor bio-distribution, undesirable pharmacokinetics behavior, and immunogenicity in vivo. Decreasing the overall surface hydrophobicity of candidate monoclonal antibodies can also provide benefits and cost savings relating to purification and dosing regimens. Individual amino acids can be identified by structural analysis as being contributory to aggregation potential in an antibody and can be located in CDR as well as framework regions. In particular, residues can be predicted to be at high risk of causing hydrophobicity issues in a given antibody. In one embodiment, the present disclosure provides an AF1 having the capability to specifically bind CD3 in which the AF1 has at least one amino acid substitution of a hydrophobic amino acid in a framework region relative to the parental antibody or antibody fragment wherein the hydrophobic amino acid is selected from isoleucine, leucine or methionine. In another embodiment, the CD3 AF1 has at least two amino acid substitutions of hydrophobic amino acids in one or more framework regions wherein the hydrophobic amino acids are selected from isoleucine, leucine or methionine.

[0158] In the context of the subject antigen binding fragments, the isoelectric point (pI) is the pH at which the antibody fragment has no net electrical charge. If the pH is below the pI of an antibody fragment, then it will have a net positive charge. A greater positive charge tends to correlate with increased blood clearance and tissue retention, with a generally shorter half-life. If the pH is greater than the pI of an antibody fragment it will have a negative charge. A negative charge generally results in decreased tissue uptake and a longer half-life. It is possible to manipulate this charge through mutations to the framework residues. These considerations informed the design of the sequences of the antigen binding fragments of the embodiments described herein wherein individual amino acid substitutions were made relative to the parental antibody utilized as the starting point. The isoelectric point of a polypeptide can be determined mathematically or experimentally in an in vitro assay. The isoelectric point (pI) is the pH at which a protein has a net charge of zero and can be calculated using the charges for the specific amino acids in the protein sequence. Estimated values for the charges are called acid dissociation constants or pKa values and are used to calculate the pI. The pI can be determined in vitro by methods such as capillary isoelectric focusing (see Datta-Mannan, A., et al. The interplay of non-specific binding, target-mediated clearance and FcRn interactions on the pharmacokinetics of humanized antibodies. mAbs 7:1084 (2015); Li, B., et al. Framework selection can influence pharmacokinetics of a humanized therapeutic antibody through differences in molecule charge. mAbs 6, 1255-1264 (2014)) or other methods known in the art.

[0159] In some aspects of any of the embodiments disclosed herein, a subject polypeptide comprising an AF1 comprises light chain complementarity-determining regions (CDR-L) and heavy chain complementarity-determining regions (CDR-H), wherein the AF1 (a) specifically binds to cluster of differentiation 3 T cell receptor (CD3), which can include, in individual form or independently combined form, all known CD3 subunits, for example CD3 epsilon, CD3 delta, CD3 gamma, CD3 zeta, CD3 alpha and CD3 beta. In one embodiment, the antigen binding fragments of any of the subject composition embodiments described herein is a chimeric or a humanized antigen binding fragment. In another embodiment, the antigen binding fragments of any of the subject composition embodiments described herein is selected from the group consisting of Fv, Fab, Fab′, Fab′-SH, linear antibody, and single-chain variable fragment (scFv). The antigen binding fragments having CDR-H and CDR-L can be configured in a (CDR-H)-(CDR-L) or a (CDR-H)-(CDR-L) orientation, N-terminus to C-terminus.

[0160] In one embodiment, the present disclosure provides polypeptides comprising an AF1 comprising CDR-L and CDR-H, wherein the AF1 (a) specifically binds to cluster of differentiation 3T cell receptor (CD3); and (b) comprises CDR-H3 having the amino acid sequence of SEQ ID NO: 10. In some embodiments of the present disclosure, the AF1 comprises CDR-H1, CDR-H2, and CDR-H3 having amino acid sequences of SEQ ID NOs: 8, 9, and 10, respectively. In another embodiment, the polypeptides of any of the subject composition embodiments described herein can comprise an AF1 wherein the AF1 comprises CDR-L and CDR-H, wherein the AF1: (a) specifically binds to CD3; (b) comprises CDR-H1, CDR-H2, and CDR-H3, wherein CDR-H3 comprises an amino acid sequence of SEQ ID NO:10; and (c) comprises heavy chain framework regions (FR-H) FR-H1, FR-H2, FR-H3, FR-H4, each exhibiting at least 86%, 87%, 88%, 89%, 90%, 91%, 92%, 93%, 94%, 95%, 96%, 97%, 98%, 99% sequence identity or is identical to amino acid sequences of SEQ ID NOs: 22, 23, 25, and 26, respectively. In another embodiment, the present disclosure provides polypeptides comprising an AF1, wherein the AF1 comprises CDR-L and CDR-H, wherein the AF1: (a) specifically binds to CD3; (b) comprises CDR-H1, CDR-H2, and CDR-H3, wherein CDR-H3 comprises an amino acid sequence of SEQ ID NO:10; and (c) comprises heavy chain framework regions (FR-H) FR-H1, FR-H2, FR-H3, FR-H4, each exhibiting at least 86%, 87%, 88%, 89%, 90%, 91%, 92%, 93%, 94%, 95%, 96%, 97%, 98%, 99% sequence identity or is identical to amino acid sequences of SEQ ID NOs: 22, 23, 25, and 26, respectively, and further comprises light chain framework regions (FR-L) FR-L1, FR-L2, FR-L3, FR-L4, each exhibiting at least 86%, 87%, 88%, 89%, 90%, 91%, 92%, 93%, 94%, 95%, 96%, 97%, 98%, 99% sequence identity or is identical to amino acid sequences of SEQ ID NOs: 12, 13, 18, and 19, respectively.

[0161] In another embodiment, a polypeptide of a subject composition embodiment described herein comprises an AF1, wherein the AF1 comprises CDR-L and CDR-H, wherein the AF1 (a) specifically binds to CD3; and (b) comprises CDR-H1, CDR-H2, and CDR-H3, wherein the CDR-H1, CDR-H2 and CDR-H3 comprises amino acid sequences of SEQ ID NOs:8, 9 and 10, respectively. In another embodiment of the foregoing, the polypeptide comprising an AF1 that further comprises (a) a CDR-L1 having an amino acid sequence of SEQ ID NOs: 1 or 2, (b) a CDR-L2 having an amino acid sequence of SEQ ID NOs: 4 or 5, and (c) a CDR-L3 having an amino acid sequence of SEQ ID NO:6. In yet another embodiment, the polypeptides of any of the subject composition embodiments described herein can comprise an AF1 that comprises CDR-L and CDR-H, wherein the AF1 (a) specifically binds to CD3; (b) comprises CDR-H1, CDR-H2, and CDR-H3, wherein the CDR-H1, CDR-H2 and CDR-H3 comprises amino acid sequences of SEQ ID NOs:8, 9 and 10, respectively and further comprise (c) a CDR-L1 having an amino acid sequence of SEQ ID NO:1; (d) a CDR-L2 having an amino acid sequence of any one of SEQ ID NOs: 4 or 5; and (e) a CDR-L3 having an amino acid sequence of SEQ ID NOs: 6 or 7. In yet another embodiment, the present disclosure provides polypeptides comprising an AF1 that comprises CDR-L and CDR-H, wherein the AF1 (a) specifically binds to CD3; (b) comprises CDR-H1, CDR-H2, and CDR-H3, wherein the CDR-H1, CDR-H2 and CDR-H3 comprises amino acid sequences of SEQ ID NOs:8, 9 and 10, respectively and further comprise (c) a CDR-L1 having an amino acid sequence of SEQ ID NO:2; (d) a CDR-L2 having an amino acid sequence of any one of SEQ ID NOs: 4 or 5; and (e) a CDR-L3 having an amino acid sequence of SEQ ID NO:6. In another embodiment, the polypeptides of any of the subject composition embodiments described herein can comprise an AF1 that comprises CDR-L and CDR-H, wherein the AF1 (a) specifically binds to CD3; (b) comprises CDR-H1, CDR-H2, and CDR-H3, wherein the CDR-H1, CDR-H2 and CDR-H3 comprises amino acid sequences of SEQ ID NOs:8, 9 and 10, respectively and further comprise (c) a CDR-L1 having an amino acid sequence of SEQ ID NO:1; (d) a CDR-L2 having an amino acid sequence of any one of SEQ ID NO: 4; and (e) a CDR-L3 having an amino acid sequence of SEQ ID NO: 6. In another embodiment, the present disclosure provides polypeptides comprising an AF1 that comprises CDR-L and CDR-H, wherein the AF1 (a) specifically binds to CD3; (b) comprises CDR-H1, CDR-H2, and CDR-H3, wherein the CDR-H1, CDR-H2 and CDR-H3 comprises amino acid sequences of SEQ ID NOs:8, 9 and 10, respectively and further comprise (c) a CDR-L1 having an amino acid sequence of SEQ ID NO:2; (d) a CDR-L2 having an amino acid sequence of any one of SEQ ID NO:5; and (e) a CDR-L3 having an amino acid sequence of SEQ ID NO:6. In the foregoing embodiments of the paragraph, the AF1 can further comprise light chain framework regions (FR-L) and heavy chain framework regions (FR-H) that link the respective CDR regions. In some cases of the foregoing embodiments of the paragraph, the AF1 further comprises: a FR-L1 exhibiting at least 86%, 87%, 88%, 89%, 90%, 91%, 92%, 93%, 94%, 95%, 96%, 97%, 98%, 99% sequence identity or is identical to the amino acid sequence of SEQ ID NO:12; a FR-L2 exhibiting at least 86%, 87%, 88%, 89%, 90%, 91%, 92%, 93%, 94%, 95%, 96%, 97%, 98%, 99% sequence identity or is identical to the amino acid sequence of SEQ ID NO:13; a FR-L3 exhibiting at least 86%, 87%, 88%, 89%, 90%, 91%, 92%, 93%, 94%, 95%, 96%, 97%, 98%, 99% sequence identity or is identical to the amino acid sequence of any one of SEQ ID NOs:14-17; a FR-L4 exhibiting at least 86%, 87%, 88%, 89%, 90%, 91%, 92%, 93%, 94%, 95%, 96%, 97%, 98%, 99% sequence identity or is identical to the amino acid sequence of SEQ ID NO:19; a FR-H1 exhibiting at least 86%, 87%, 88%, 89%, 90%, 91%, 92%, 93%, 94%, 95%, 96%, 97%, 98%, 99% sequence identity or is identical to the amino acid sequences of any one of SEQ ID NO:20, SEQ ID NO:21; a FR-H2 exhibiting at least 86%, 87%, 88%, 89%, 90%, 91%, 92%, 93%, 94%, 95%, 96%, 97%, 98%, 99% sequence identity or is identical to the amino acid sequence of SEQ ID NO:23; a FR-H3 exhibiting at least 86%, 87%, 88%, 89%, 90%, 91%, 92%, 93%, 94%, 95%, 96%, 97%, 98%, 99% sequence identity or is identical to the amino acid sequence of SEQ ID NO:24; and a FR-H4 exhibiting at least 86%, 87%, 88%, 89%, 90%, 91%, 92%, 93%, 94%, 95%, 96%, 97%, 98%, 99% sequence identity or is identical to the amino acid sequence of any one of SEQ ID NO:26. In other cases of the foregoing embodiments of the paragraph, the AF1 further comprises: a FR-L1 exhibiting at least 86%, 87%, 88%, 89%, 90%, 91%, 92%, 93%, 94%, 95%, 96%, 97%, 98%, 99% sequence identity or is identical to the amino acid sequence of SEQ ID NO:12; a FR-L2 exhibiting at least 86%, 87%, 88%, 89%, 90%, 91%, 92%, 93%, 94%, 95%, 96%, 97%, 98%, 99% sequence identity or is identical to the amino acid sequence of SEQ ID NO:13; a FR-L3 exhibiting at least 86%, 87%, 88%, 89%, 90%, 91%, 92%, 93%, 94%, 95%, 96%, 97%, 98%, 99% sequence identity or is identical to the amino acid sequence of SEQ ID NO:14; a FR-L4 exhibiting at least 86%, 87%, 88%, 89%, 90%, 91%, 92%, 93%, 94%, 95%, 96%, 97%, 98%, 99% sequence identity or is identical to the amino acid sequence of SEQ ID NO:19; a FR-H1 exhibiting at least 86%, 87%, 88%, 89%, 90%, 91%, 92%, 93%, 94%, 95%, 96%, 97%, 98%, 99% sequence identity or is identical to the amino acid sequence of SEQ ID NO:20; a FR-H2 exhibiting at least 86%, 87%, 88%, 89%, 90%, 91%, 92%, 93%, 94%, 95%, 96%, 97%, 98%, 99% sequence identity or is identical to the amino acid sequence of SEQ ID NO:23; a FR-H3 exhibiting at least 86%, 87%, 88%, 89%, 90%, 91%, 92%, 93%, 94%, 95%, 96%, 97%, 98%, 99% sequence identity or is identical to the amino acid sequence of SEQ ID NO:24; and a FR-H4 exhibiting at least 86%, 87%, 88%, 89%, 90%, 91%, 92%, 93%, 94%, 95%, 96%, 97%, 98%, 99% sequence identity or is identical to the amino acid sequence of SEQ ID NO:26. In other cases of the foregoing embodiments of the paragraph, the AF1 further comprises: a FR-L1 exhibiting at least 86%, 87%, 88%, 89%, 90%, 91%, 92%, 93%, 94%, 95%, 96%, 97%, 98%, 99% sequence identity or is identical to the amino acid sequence of SEQ ID NO:12; a FR-L2 exhibiting at least 86%, 87%, 88%, 89%, 90%, 91%, 92%, 93%, 94%, 95%, 96%, 97%, 98%, 99% sequence identity or is identical to the amino acid sequence of SEQ ID NO:13; a FR-L3 exhibiting at least 86%, 87%, 88%, 89%, 90%, 91%, 92%, 93%, 94%, 95%, 96%, 97%, 98%, 99% sequence identity or is identical to the amino acid sequence of SEQ ID NO:15; a FR-L4 exhibiting at least 86%, 87%, 88%, 89%, 90%, 91%, 92%, 93%, 94%, 95%, 96%, 97%, 98%, 99% sequence identity or is identical to the amino acid sequence of SEQ ID NO:19; a FR-H1 exhibiting at least 86%, 87%, 88%, 89%, 90%, 91%, 92%, 93%, 94%, 95%, 96%, 97%, 98%, 99% sequence identity or is identical to the amino acid sequence of SEQ ID NO:21; a FR-H2 exhibiting at least 86%, 87%, 88%, 89%, 90%, 91%, 92%, 93%, 94%, 95%, 96%, 97%, 98%, 99% sequence identity or is identical to the amino acid sequence of SEQ ID NO:23; a FR-H3 exhibiting at least 86%, 87%, 88%, 89%, 90%, 91%, 92%, 93%, 94%, 95%, 96%, 97%, 98%, 99% sequence identity or is identical to the amino acid sequence of SEQ ID NO:24; and a FR-H4 exhibiting at least 86%, 87%, 88%, 89%, 90%, 91%, 92%, 93%, 94%, 95%, 96%, 97%, 98%, 99% sequence identity or is identical to the amino acid sequence of SEQ ID NO:26. In other cases of the foregoing embodiments of the paragraph, the AF1 comprises: a FR-L1 exhibiting at least 86%, 87%, 88%, 89%, 90%, 91%, 92%, 93%, 94%, 95%, 96%, 97%, 98%, 99% sequence identity or is identical to the amino acid sequence of SEQ ID NO:12; a FR-L2 exhibiting at least 86%, 87%, 88%, 89%, 90%, 91%, 92%, 93%, 94%, 95%, 96%, 97%, 98%, 99% sequence identity or is identical to the amino acid sequence of SEQ ID NO:13; a FR-L3 exhibiting at least 86%, 87%, 88%, 89%, 90%, 91%, 92%, 93%, 94%, 95%, 96%, 97%, 98%, 99% sequence identity or is identical to the amino acid sequence of SEQ ID NO:16; a FR-L4 exhibiting at least 86%, 87%, 88%, 89%, 90%, 91%, 92%, 93%, 94%, 95%, 96%, 97%, 98%, 99% sequence identity or is identical to the amino acid sequence of SEQ ID NO:19; a FR-H1 exhibiting at least 86%, 87%, 88%, 89%, 90%, 91%, 92%, 93%, 94%, 95%, 96%, 97%, 98%, 99% sequence identity or is identical to the amino acid sequence of SEQ ID NO:21; a FR-H2 exhibiting at least 86%, 87%, 88%, 89%, 90%, 91%, 92%, 93%, 94%, 95%, 96%, 97%, 98%, 99% sequence identity or is identical to the amino acid sequence of SEQ ID NO:23; a FR-H3 exhibiting at least 86%, 87%, 88%, 89%, 90%, 91%, 92%, 93%, 94%, 95%, 96%, 97%, 98%, 99% sequence identity or is identical to the amino acid sequence of SEQ ID NO:24; and a FR-H4 exhibiting at least 86%, 87%, 88%, 89%, 90%, 91%, 92%, 93%, 94%, 95%, 96%, 97%, 98%, 99% sequence identity or is identical to the amino acid sequence of SEQ ID NO:26. In still other cases of the foregoing embodiments of the paragraph, the polypeptide comprising an AF1 comprises: a FR-L1 exhibiting at least 86%, 87%, 88%, 89%, 90%, 91%, 92%, 93%, 94%, 95%, 96%, 97%, 98%, 99% sequence identity or is identical to the amino acid sequence of SEQ ID NO:12; a FR-L2 exhibiting at least 86%, 87%, 88%, 89%, 90%, 91%, 92%, 93%, 94%, 95%, 96%, 97%, 98%, 99% sequence identity or is identical to the amino acid sequence of SEQ ID NO:13; a FR-L3 exhibiting at least 86%, 87%, 88%, 89%, 90%, 91%, 92%, 93%, 94%, 95%, 96%, 97%, 98%, 99% sequence identity or is identical to the amino acid sequence of SEQ ID NO:17; a FR-L4 exhibiting at least 86%, 87%, 88%, 89%, 90%, 91%, 92%, 93%, 94%, 95%, 96%, 97%, 98%, 99% sequence identity or is identical to the amino acid sequence of SEQ ID NO:19; a FR-H1 exhibiting at least 86%, 87%, 88%, 89%, 90%, 91%, 92%, 93%, 94%, 95%, 96%, 97%, 98%, 99% sequence identity or is identical to the amino acid sequence of SEQ ID NO:21; a FR-H2 exhibiting at least 86%, 87%, 88%, 89%, 90%, 91%, 92%, 93%, 94%, 95%, 96%, 97%, 98%, 99% sequence identity or is identical to the amino acid sequence of SEQ ID NO:23; a FR-H3 exhibiting at least 86%, 87%, 88%, 89%, 90%, 91%, 92%, 93%, 94%, 95%, 96%, 97%, 98%, 99% sequence identity or is identical to the amino acid sequence of SEQ ID NO:24; and a FR-H4 exhibiting at least 86%, 87%, 88%, 89%, 90%, 91%, 92%, 93%, 94%, 95%, 96%, 97%, 98%, 99% sequence identity or is identical to the amino acid sequence of SEQ ID NO:26.

[0162] In some aspects of any of the embodiments disclosed herein, a subject polypeptide can comprise an AF1 that binds to CD3, wherein the AF1 comprises VL regions and VH regions that confer the capability to specifically bind CD3. The AF1s can be configured in a VL-VH or VH-VL orientation and are fused by a linker peptide.

[0163] In one case, the present disclosure provides polypeptides comprising an AF1 comprising a VH amino acid sequence having at least 90%, 91%, 92%, 93%, 94%, 95%, 96%, 97%, 98%, 99% sequence identity or is identical to an amino acid sequence of SEQ ID NO:28 or SEQ ID NO:31. In another case, the present disclosure provides polypeptides comprising an AF1 comprising a VL amino acid sequence having at least 90%, 91%, 92%, 93%, 94%, 95%, 96%, 97%, 98%, 99% sequence identity or is identical to an amino acid sequence of any one of SEQ ID NOs: 27, 29, 30, 32, or 33. In another case, the polypeptides of any of the subject composition embodiments described herein comprise an AF1 that binds to CD3, wherein the AF1 comprises VL regions and VH regions that confer the capability to specifically bind CD3 and each has at least about 90%, 91%, 92%, 93%, 94%, 95%, 96%, 97%, 98%, 99% sequence identity or is identical to an amino acid sequence of SEQ ID NOs: 27 and 28, respectively. In other cases, the present disclosure provides polypeptides comprising an AF1 that binds to CD3, wherein the AF1 comprises VL regions and VH regions that confer the capability to specifically bind CD3 and each has at least about 90%, 91%, 92%, 93%, 94%, 95%, 96%, 97%, 98%, 99% sequence identity or is identical to an amino acid sequence of SEQ ID NOs: 29 and 28, respectively. In another case, the present disclosure provides polypeptides comprising an AF1 that binds to CD3, wherein the AF1 comprises VL regions and VH regions that confer the capability to specifically bind CD3 and each has at least about 90%, 91%, 92%, 93%, 94%, 95%, 96%, 97%, 98%, 99% sequence identity or is identical to an amino acid sequence of SEQ ID NOs: 30 and 31, respectively. In yet another case, the polypeptides of any of the subject composition embodiments described herein comprise an AF1 that binds to CD3, wherein the AF1 comprises VL regions and VH regions that confer the capability to specifically bind CD3 and each has at least about 90%, 91%, 92%, 93%, 94%, 95%, 96%, 97%, 98%, 99% sequence identity or is identical to an amino acid sequence of SEQ ID NOs: 32 and 31, respectively. In other cases, the present disclosure provides polypeptides comprising an AF1 that binds to CD3, wherein the AF1 comprises VL regions and VH regions that confer the capability to specifically bind CD3 and each has at least about 90%, 91%, 92%, 93%, 94%, 95%, 96%, 97%, 98%, 99% sequence identity or is identical to an amino acid sequence of SEQ ID NOs: 33 and 31, respectively.

[0164] In some aspects of any of the embodiments disclosed herein, a subject polypeptide comprises an AF1 that binds to CD3, wherein the AF1 is configured as an scFv having the capability to specifically bind CD3. In one embodiment, the AF1 comprises an amino acid sequence having at least 95%, 96%, 97%, 98%, 99% sequence identity or is identical to an amino acid sequence of any one of SEQ ID NOs:36-40.

[0165] In some cases, the CD3 AF1 of the polypeptide embodiments described herein specifically bind human or cynomolgus monkey (cyno) CD3. In other cases, the CD3 AF1 of the polypeptide embodiments described herein specifically binds human and cynomolgus monkey (cyno) CD3. In one embodiment, the CD3 AF1 of the polypeptide embodiments described herein binds a CD3 complex subunit selected from CD3 epsilon, CD3 delta, CD3 gamma, CD3 zeta, CD3 alpha and CD3 beta epsilon unit of CD3. In one embodiment, the AF1 of the polypeptide embodiments described herein binds a CD3 epsilon fragment of CD3.

[0166] In another aspect, the present disclosure provides polypeptides comprising an AF1 that binds to the CD3 protein complex and that has enhanced stability compared to CD3 binding antibodies or AF1s known in the art. Additionally, certain CD3 AF1 of the disclosure are designed to confer a higher degree of stability on the chimeric bispecific antigen binding compositions into which they are integrated, which may lead to improved expression and recovery of the fusion protein, increased shelf-life, and enhanced stability when administered to a subject. In one approach, certain CD3 AF1s of the present disclosure are designed to have a higher degree of thermal stability compared to certain CD3-binding antibodies and antigen binding fragments known in the art. As a result, the CD3 AF1 utilized as components of the chimeric bispecific antigen binding fragment compositions into which they are integrated exhibit favorable pharmaceutical properties, including high thermostability and low aggregation propensity, resulting in improved expression and recovery during manufacturing and storage, as well promoting long serum half-life. Biophysical properties such as thermostability are often limited by the antibody variable domains, which differ greatly in their intrinsic properties. High thermal stability is often associated with high expression levels and other desired properties, including being less susceptible to aggregation (Buchanan A, et al. Engineering a therapeutic IgG molecule to address cysteinylation, aggregation and enhance thermal stability and expression. MAbs 2013; 5:255). Thermal stability is determined by measuring the “melting temperature” (Tₘ), which is defined as the temperature at which half of the molecules are denatured. The melting temperature of each heterodimer is indicative of its thermal stability. In vitro assays to determine Tₘ are known in the art, including methods described in the Examples, below. The melting point of the heterodimer may be measured using techniques such as differential scanning calorimetry (Chen et al (2003) Pharm Res 20:1952-60; Ghirlando et al (1999) Immunol Lett 68:47-52). Alternatively, the thermal stability of the heterodimer may be measured using circular dichroism (Murray et al. (2002) J. Chromatogr Sci 40:343-9).

[0167] Thermal denaturation curves of the CD3 binding fragments and the anti-CD3 bispecific antibodies comprising said anti-CD3 binding fragment and a reference binding of the present disclosure show that various constructs of the present disclosure are more resistant to thermal denaturation than the antigen binding fragment consisting of a sequence shown in SEQ ID NO:41 or a control bispecific antibody wherein said control bispecific antigen binding fragment comprises SEQ ID NO:41 and a reference antigen binding fragment that binds to an antigen other than CD3. In one embodiment, the polypeptides of embodiments described herein comprise an anti-CD3 AF1, wherein the AF1 comprises CDR-L and CDR-H, and wherein the AF1: specifically binds to CD3; comprises CDR-H1, CDR-H2, and CDR-H3, wherein CDR-H3 comprises an amino acid sequence of SEQ ID NO:10, and exhibits a higher thermal stability, as evidenced by in an in vitro assay, wherein (i) the polypeptide exhibits a higher melting temperature (Tₘ) relative to that of an antigen binding fragment consisting of a sequence shown in SEQ ID NO:41, or (ii) upon incorporating said anti-CD3 AF1 into an anti-CD3 bispecific antibody, the bispecific antibody exhibits a higher Tₘ relative to a control bispecific antibody, wherein said anti-CD3 bispecific antibody comprises said anti-CD3 binding fragment and a reference antigen binding fragment that binds to an antigen other than CD3, and wherein said control bispecific antigen binding fragment consists of SEQ ID NO:41 and said reference antigen binding fragment. For instance, in some circumstances, the control bispecific antibody is identical to the subject polypeptide except that the AF1 is replaced with the antigen-binding fragment of SEQ ID NO:41). The reference antigen binding fragment of the embodiments is intended to include antigen binding fragments that bind any of the target cell markers described herein, including but not limited to EGFR, HER2, EpCAM, and CD19, amongst the other disclosed target cell markers. In one embodiment, the present disclosure provides a polypeptide comprising an anti-CD3 AF1, wherein the Tₘ of the AF1 is at least 2° C. greater, or at least 3° C. greater, or at least 4° C. greater, or at least 5° C. greater, or at least 6° C. greater, or at least 7° C. greater, or at least 8° C. greater, or at least 9° C. greater, or at least 10° C. greater than the Tₘ of an antigen binding fragment consisting of a sequence of SEQ ID NO:41. In another embodiment, the present disclosure provides a polypeptide comprising an anti-CD3 AF1, wherein the Tₘ of the AF1 is at least 2-10° C. greater, or at least 3-9° C. greater, or at least 4-8° C. greater, or at least 5-7° C. greater than the Tₘ of an antigen binding fragment consisting of the sequence of SEQ ID NO:41. In yet another embodiment, the disclosure provides bispecific antigen binding polypeptides comprising an anti-CD3 AF1, wherein the AF1 comprises CDR-L and CDR-H, and wherein the AF1: specifically binds to CD3; comprises CDR-H1, CDR-H2, and CDR-H3, wherein CDR-H3 comprises an amino acid sequence of SEQ ID NO:10, and a second antigen binding fragment that binds to an antigen other than CD3, and exhibits a higher thermal stability, as evidenced by in an in vitro assay, wherein the bispecific antigen binding polypeptide exhibits a higher melting temperature (Tₘ) relative to that of a control bispecific antibody control comprising a sequence shown in SEQ ID NO:41 and a reference antigen binding fragment that binds to an antigen other than CD3.

[0168] In a related aspect, the present disclosure provides various polypeptides comprising an AF1 that binds to CD3 that are incorporated into chimeric, bispecific antigen binding fragment compositions that are designed to have an isoelectric point (pI) that confer enhanced stability on the compositions of the disclosure compared to corresponding compositions comprising CD3 binding antibodies or antigen binding fragments known in the art. In one embodiment, polypeptide embodiments described herein can comprise antigen binding fragments that bind to CD3 wherein the AF1 exhibits a pI that is between 5.8 and 6.6, inclusive. In another embodiment, the present disclosure provides polypeptides comprising AF1 that bind to CD3 wherein the AF1 exhibits a pI that is at least 0.1, 0.2, 0.3, 0.4, 0.5, 0.6, 0.7, 0.8, 0.9, 1.0, 1.1, 1.2, 1.3, 1.4 or 1.5 pH units lower than the pI of a reference antigen binding fragment consisting of a sequence shown in SEQ ID NO: 41. In another embodiment, a polypeptide of any of the subject composition embodiments described herein can comprise an AF1 that binds to CD3 fused to a second antigen binding fragment that binds to an antigen other than CD3 wherein the CD3 AF1 exhibits a pI that is within at least 0.1, 0.2, 0.3, 0.4, 0.5, 0.6, 0.7, 0.8, 0.9, 1.0, 1.1, 1.2, 1.3, 1.4, or 1.5 pH units of the pI of the antigen binding fragment that does not binds to CD3. In another embodiment, the present disclosure provides polypeptides comprising an AF1 that binds to CD3 fused to a second antigen binding fragment that binds to an antigen other than CD3 wherein the CD3 AF1 exhibits a pI that is within at least about 0.1 to about 1.5, or at least about 0.3 to about 1.2, or at least about 0.5 to about 1.0, or at least about 0.7 to about 0.9 pH units of the pI of the second antigen binding fragment, as evidenced by calculation (see examples) or an in vitro assay. In one embodiment, the second antigen binding fragment has specific binding affinity to a non-CD3 antigen selected from the group consisting of EpCAM, EGFR, HER2, CD19, or any of the target cell marker embodiments disclosed herein, including but not limited to the target cell markers of Table 8. It is specifically intended that by such design wherein the pI of the two antigen binding fragments are within such ranges, the resulting fused antigen binding fragments will confer a higher degree of stability on the chimeric bispecific antigen binding fragment compositions into which they are integrated, leading to improved expression and enhanced recovery of the fusion protein in soluble, non-aggregated form, increased shelf-life of the formulated chimeric bispecific polypeptide compositions, and enhanced stability when the composition is administered to a subject.

[0169] In some aspects of any of the embodiments disclosed herein, a subject polypeptide comprises an AF1 that specifically binds human or cyno CD3 with a dissociation constant (K_{d}) constant between about between about 10 nM and about 400 nM, or between about 50 nM and about 350 nM, or between about 100 nM and 300 nM, as determined in an in vitro antigen-binding assay comprising a human or cyno CD3 antigen. In another embodiment, a polypeptide of any of the subject composition embodiments described herein can comprise an AF1 that specifically binds human or cyno CD3 with a dissociation constant (K_{d}) weaker than about 10 nM, or about 50 nM, or about 100 nM, or about 150 nM, or about 200 nM, or about 250 nM, or about 300 nM, or about 350 nM, or weaker than about 400 nM as determined in an in vitro antigen-binding assay. For clarity, an antigen binding fragment with a K_{d} of 400 nM binds its ligand more weakly than one with a K_{d} of 10 nM.

[0170] In another embodiment, the present disclosure provides polypeptides comprising an AF1 that exhibits a binding affinity to CD3 that is at least 2-fold, 3-fold, 4-fold, 5-fold, 6-fold, 7-fold, 8-fold, 9-fold, or at least 10-fold weaker relative to that of an antigen binding fragment consisting of an amino acid sequence of SEQ ID NO:41, as determined by the respective dissociation constants (K_{d}) in an in vitro antigen-binding assay. In another embodiment, the present disclosure provides polypeptides comprising an AF1 that exhibits a binding affinity to CD3 that is at least 2-fold, 3-fold, 4-fold, 5-fold, 6-fold, 7-fold, 8-fold, 9-fold, 10-fold, 20-fold, 50-fold, 100-fold, or at least 1000-fold at weaker relative to that of a second antigen binding fragment incorporated into the polypeptide that specifically binds an antigen other than CD3, as determined by the respective dissociation constants (K_{d}) in an in vitro antigen-binding assay. In the foregoing embodiment, the antigen other than CD3 is selected from, but not be limited to HER2, EGFR, EpCAM, or CD19, or any of the target cell marker embodiments disclosed herein, including but not limited to the target cell markers of Table 8. The binding affinity of the subject compositions for the target ligands can be assayed using binding or competitive binding assays, such as Biacore assays with chip-bound receptors or binding proteins or ELISA assays, as described in U.S. Pat. No. 5,534,617, assays described in the Examples herein, radio-receptor assays, or other assays known in the art. The binding affinity constant can then be determined using standard methods, such as Scatchard analysis, as described by van Zoelen, et al., Trends Pharmacol Sciences (1998) 19)12):487, or other methods known in the art. The same methodologies would be employed to make bispecific antigen binding fragment constructs having antigen binding fragments against CD3 and target cell markers described herein, in any combination or orientation (i.e., AF1-AF2 or AF2-AF1 in an N- to C-terminal orientation).

TABLE 1
CD3 CDR SEQUENCES

| | CDR | | |
|---|---|---|---|
| Construct | REGION | Amino Acid Sequence | SEQ ID NO: |
| 3.23, 3.30, 3.31, 3.32 | CDR-L1 | RSSNGAVTSSNYAN | 1 |
| 3.24 | CDR-L1 | RSSNGEVTTSNYAN | 2 |
| 3.9 | CDR-L1 | RSSTGAVTTSNYAN | 3 |
| 3.23, 3.30, 3.31, 3.32, 3.9 | CDR-L2 | GTNKRAP | 4 |
| 3.24 | CDR-L2 | GTIKRAP | 5 |
| 3.23, 3.24, 3.30, 3.31, 3.32 | CDR-L3 | ALWYPNLWVF | 6 |
| 3.9 | CDR-L3 | ALWYSNLWVF | 7 |
| 3.23, 3.24, 3.30, 3.31, 3.32, 3.9 | CDR-H1 | GFTFNTYAMN | 8 |
| 3.23, 3.24, 3.30, 3.31, 3.32, 3.9 | CDR-H2 | RIRSKYNNYATYYADSVKD | 9 |
| 3.23. 3.24, 3.30, 3.31, 3.32 | CDR-H3 | HENFGNSYVSWFAH | 10 |
| 3.9 | CDR-H3 | HGNFGNSYVSWFAY | 11 |

TABLE 2
CD3 FR SEQUENCES

| | FR | | SEQ ID |
|---|---|---|---|
| Construct | REGION | Amino Acid Sequence | NO: |
| 3.23, 3.24, 3.30, 3.31, 3.32, | FR-L1 | ELVVTQEPSLTVSPGGTVTLTC | 12 |
| 3.9 | | | |
| 3.23, 3.24, 3.30, 3.31, 3.32, | FR-L2 | WVQQKPGQAPRGLIG | 13 |
| 3.9 | | | |
| 3.23, 3.24 | FR-L3 | GTPARFSGSLLGGKAALTLSGVQPEDEAVYYC | 14 |
| 3.30 | FR-L3 | GTPARFSGSSLGGKAALTLSGVQPEDEAVYYC | 15 |
| 3.31 | FR-L3 | GTPARFSGSLLGGSAALTLSGVQPEDEAVYYC | 16 |
| 3.32 | FR-L3 | GTPARFSGSSLGGSAALTLSGVQPEDEAVYYC | 17 |
| 3.9 | FR-L3 | GTPARFSGSLLGGKAALTLSGVQPEDEAEYYC | 18 |
| 3.23, 3.24, 3.30, 3.31, 3.32, | FR-L4 | GGGTKLTVL | 19 |
| 3.9 | | | |
| 3.23, 3.24 | FR-H1 | EVQLLESGGGIVQPGGSLKLSCAAS | 20 |
| 3.30, 3.31, 3.32 | FR-H1 | EVQLQESGGGIVQPGGSLKLSCAAS | 21 |
| 3.9 | FR-H1 | EVQLLESGGGLVQPGGSLKLSCAAS | 22 |
| 3.23, 3.24, 3.30, 3.31, 3.32, | FR-H2 | WVRQAPGKGLEWVA | 23 |
| 3.9 | | | |
| 3.23, 3.24, 3.30, 3.31, 3.32 | FR-H3 | RFTISRDDSKNTVYLQMNNLKTEDTAVYYCVR | 24 |
| 3.9 | FR-H3 | RFTISRDDSKNTAYLQMNNLKTEDTAVYYCVR | 25 |
| 3.23, 3.24, 3.30, 3.31, 3.32, | FR-H4 | WGQGTLVTVSS | 26 |
| 3.9 | | | |

TABLE 3
VL & VH SEQUENCES

| | | | SEQ ID |
|---|---|---|---|
| Construct | REGION | Amino Acid Sequence | NO: |
| 3.23 | VL | ELVVTQEPSLTVSPGGTVTLTCRSSNGAVTSSNYANWVQQ | 27 |
| | | KPGQAPRGLIGGTNKRAPGTPARFSGSLLGGKAALTLSGV | |
| | | QPEDEAVYYCALWYPNLWVFGGGTKLTVL | |
| 3.23, 3.24 | VH | EVQLLESGGGIVQPGGSLKLSCAASGFTFNTYAMNWVRQA | 28 |
| | | PGKGLEWVARIRSKYNNYATYYADSVKDRFTISRDDSKNT | |
| | | VYLQMNNLKTEDTAVYYCVRHENFGNSYVSWFAHWGQGTL | |
| | | VTVSS | |
| 3.24 | VL | ELVVTQEPSLTVSPGGTVTLTCRSSNGEVTTSNYANWVQQ | 29 |
| | | KPGQAPRGLIGGTIKRAPGTPARFSGSLLGGKAALTLSGV | |
| | | QPEDEAVYYCALWYPNLWVFGGGTKLTVL | |
| 3.30 | VL | ELVVTQEPSLTVSPGGTVTLTCRSSNGAVTSSNYANWVQQ | 30 |
| | | KPGQAPRGLIGGTNKRAPGTPARFSGSSLGGKAALTLSGV | |
| | | QPEDEAVYYCALWYPNLWVFGGGTKLTVL | |
| 3.30, 3.31, | VH | EVQLQESGGGIVQPGGSLKLSCAASGFTFNTYAMNWVRQA | 31 |
| 3.32 | | PGKGLEWVARIRSKYNNYATYYADSVKDRFTISRDDSKNT | |
| | | VYLQMNNLKTEDTAVYYCVRHENFGNSYVSWFAHWGQGTL | |
| | | VTVSS | |
| 3.31 | VL | ELVVTQEPSLTVSPGGTVTLTCRSSNGAVTSSNYANWVQQ | 32 |
| | | KPGQAPRGLIGGTNKRAPGTPARFSGSLLGGSAALTLSGV | |
| | | QPEDEAVYYCALWYPNLWVFGGGTKLTVL | |
| 3.32 | VL | ELVVTQEPSLTVSPGGTVTLTCRSSNGAVTSSNYANWVQQ | 33 |
| | | KPGQAPRGLIGGTNKRAPGTPARFSGSSLGGSAALTLSGV | |
| | | QPEDEAVYYCALWYPNLWVFGGGTKLTVL | |
| 3.9 | VL | ELVVTQEPSLTVSPGGTVTLTCRSSTGAVTTSNYANWVQQ | 34 |
| | | KPGQAPRGLIGGTNKRAPGTPARFSGSLLGGKAALTLSGV | |
| | | QPEDEAEYYCALWYSNLWVFGGGTKLTVL | |
| 3.9 | VH | EVQLLESGGGLVQPGGSLKLSCAASGFTFNTYAMNWVRQA | 35 |
| | | PGKGLEWVARIRSKYNNYATYYADSVKDRFTISRDDSKNT | |
| | | AYLQMNNLKTEDTAVYYCVRHGNFGNSYVSWFAYWGQGTL | |
| | | VTVSS | |
| 3.33 | VL | ELVVTQEPSLTVSPGGTVTLTCRSSTGAVTTSNYANWVQQ | 919 |
| | | KPGQAPRGLIGGTNKRAPGTPARFSGSSLGGSAALTLSGV | |
| | | QPEDEAEYYCALWYSNLWVFGGGTKLTVL | |
| 3.33 | VH | EVQLQESGGGLVQPGGSLKLSCAASGFTFNTYAMNWVRQA | 920 |
| | | PGKGLEWVARIRSKYNNYATYYADSVKDRFTISRDDSKNT | |
| | | AYLQMNNLKTEDTAVYYCVRHGNFGNSYVSWFAYWGQGTL | |
| | | VTVSS | |

TABLE 4
scFv sequences

| Construct | Amino Acid Sequence | SEQ ID NO: |
|---|---|---|
| 3.23 | ELVVTQEPSLTVSPGGTVTLTCRSSNGAVTSSNYANWVQQKPGQAPRGLIG | 36 |
| | GTNKRAPGTPARFSGSLLGGKAALTLSGVQPEDEAVYYCALWYPNLWVFGG | |
| | GTKLTVLGATPPETGAETESPGETTGGSAESEPPGEGEVQLLESGGGIVQP | |
| | GGSLKLSCAASGFTFNTYAMNWVRQAPGKGLEWVARIRSKYNNYATYYADS | |
| | VKDRFTISRDDSKNTVYLQMNNLKTEDTAVYYCVRHENFGNSYVSWFAHWG | |
| | QGTLVTVSS | |
| 3.24 | ELVVTQEPSLTVSPGGTVTLTCRSSNGEVTTSNYANWVQQKPGQAPRGLIG | 37 |
| | GTIKRAPGTPARFSGSLLGGKAALTLSGVQPEDEAVYYCALWYPNLWVFGG | |
| | GTKLTVLGATPPETGAETESPGETTGGSAESEPPGEGEVQLLESGGGIVQP | |
| | GGSLKLSCAASGFTFNTYAMNWVRQAPGKGLEWVARIRSKYNNYATYYADS | |
| | VKDRFTISRDDSKNTVYLQMNNLKTEDTAVYYCVRHENFGNSYVSWFAHWG | |
| | QGTLVTVSS | |
| 3.30 | ELVVTQEPSLTVSPGGTVTLTCRSSNGAVTSSNYANWVQQKPGQAPRGLIG | 38 |
| | GTNKRAPGTPARFSGSSLGGKAALTLSGVQPEDEAVYYCALWYPNLWVFGG | |
| | GTKLTVLGATPPETGAETESPGETTGGSAESEPPGEGEVQLQESGGGIVQP | |
| | GGSLKLSCAASGFTFNTYAMNWVRQAPGKGLEWVARIRSKYNNYATYYADS | |
| | VKDRFTISRDDSKNTVYLQMNNLKTEDTAVYYCVRHENFGNSYVSWFAHWG | |
| | QGTLVTVSS | |
| 3.31 | ELVVTQEPSLTVSPGGTVTLTCRSSNGAVTSSNYANWVQQKPGQAPRGLIG | 39 |
| | GTNKRAPGTPARFSGSLLGGSAALTLSGVQPEDEAVYYCALWYPNLWVFGG | |
| | GTKLTVLGATPPETGAETESPGETTGGSAESEPPGEGEVQLQESGGGIVQP | |
| | GGSLKLSCAASGFTFNTYAMNWVRQAPGKGLEWVARIRSKYNNYATYYADS | |
| | VKDRFTISRDDSKNTVYLQMNNLKTEDTAVYYCVRHENFGNSYVSWFAHWG | |
| | QGTLVTVSS | |
| 3.32 | ELVVTQEPSLTVSPGGTVTLTCRSSNGAVTSSNYANWVQQKPGQAPRGLIG | 40 |
| | GTNKRAPGTPARFSGSSLGGSAALTLSGVQPEDEAVYYCALWYPNLWVFGG | |
| | GTKLTVLGATPPETGAETESPGETTGGSAESEPPGEGEVQLQESGGGIVQP | |
| | GGSLKLSCAASGFTFNTYAMNWVRQAPGKGLEWVARIRSKYNNYATYYADS | |
| | VKDRFTISRDDSKNTVYLQMNNLKTEDTAVYYCVRHENFGNSYVSWFAHWG | |
| | QGTLVTVSS | |
| 3.9 | ELVVTQEPSLTVSPGGTVTLTCRSSTGAVTTSNYANWVQQKPGQAPRGLIG | 41 |
| | GTNKRAPGTPARFSGSLLGGKAALTLSGVQPEDEAEYYCALWYSNLWVFGG | |
| | GTKLTVLGATPPETGAETESPGETTGGSAESEPPGEGEVQLLESGGGLVQP | |
| | GGSLKLSCAASGFTFNTYAMNWVRQAPGKGLEWVARIRSKYNNYATYYADS | |
| | VKDRFTISRDDSKNTAYLQMNNLKTEDTAVYYCVRHGNFGNSYVSWFAYWG | |
| | QGTLVTVSS | |
| 3.33 | ELVVTQEPSLTVSPGGTVTLTCRSSTGAVTTSNYANWVQQKPGQAPRGLIG | 921 |
| | GTNKRAPGTPARFSGSSLGGSAALTLSGVQPEDEAEYYCALWYSNLWVFGG | |
| | GTKLTVLGATPPETGAETESPGETTGGSAESEPPGEGEVQLQESGGGLVQP | |
| | GGSLKLSCAASGFTFNTYAMNWVRQAPGKGLEWVARIRSKYNNYATYYADS | |
| | VKDRFTISRDDSKNTAYLQMNNLKTEDTAVYYCVRHGNFGNSYVSWFAYWG | |
| | QGTLVTVSS | |
| 4.11 | QSVLTQPPSASGTPGQRVTISCSGSSSNIGSNYVYWYQQLPGTAPKLLIYR | 1160 |
| | NNQRPSGVPDRFSGSKSGTSASLAISGLRSEDEADYYCAAWDDSLSGLWVF | |
| | GGGTKLTVLGATPPETGAETESPGETTGGSAESEPPGEGQVQLQQWGGGLV | |
| | KPGGSLRLSCAASGFTFSSYSMNWVRQAPGKGLEWVSRINSDGSSTNYADS | |
| | VKGRFTISRDNAKNTLYLQMNSLRAEDTAVYYCARELRWGNWGQGTLVTVS | |
| | S | |
| 4.12 | QAGLTQPPSASGTPGQRVTLSCSGSYSNIGTYYVYWYQQLPGTAPKLLIYS | 1161 |
| | NDQRLSGVPDRFSGSKSGTSASLAISGLQSEDEAAYYCAAWDDSLNGWAFG | |
| | GGTKLTVLGATPPETGAETESPGETTGGSAESEPPGEGQVQLQQWGGGLVK | |
| | PGGSLRLSCAASGFTFSSYSMNWVRQAPGKGLEWVSRINSDGSSTNYADSV | |
| | KGRFTISRDNAKNTLYLQMNSLRAEDTAVYYCARELRWGNWGQGTLVTVSS | |
| 4.13 | QPGLTQPPSASGTPGQRVTLSCSGRSSNIGSYYVYWYQHLPGMAPKLLIYR | 1162 |
| | NSRRPSGVPDRFSGSKSGTSASLVISGLQSDDEADYYCAAWDDSLKSWVFG | |
| | GGTKLTVLGATPPETGAETESPGETTGGSAESEPPGEGQVQLQQWGGGLVK | |
| | PGGSLRLSCAASGFTFSSYSMNWVRQAPGKGLEWVSRINSDGSSTNYADSV | |
| | KGRFTISRDNAKNTLYLQMNSLRAEDTAVYYCARELRWGNWGQGTLVTVSS | |
| 4.14 | QSVLTQPPSASGTPGQRVTISCSGSSSNIGTNYVYWYQQFPGTAPKLLIYS | 1163 |
| | NNQRPSGVPDRFSGSKSGTSGSLAISGLQSEDEADYSCAAWDDSLNGWVFG | |
| | GGTKLTVLGATPPETGAETESPGETTGGSAESEPPGEGQVQLVQWGGGLVK | |
| | PGGSLRLSCAASGFTFSSYSMNWVRQAPGKGLEWVSRINSDGSSTNYADSV | |
| | KGRFTISRDNAKNTLYLQMNSLRAEDTAVYYCARELRWGNWGQGTLVTVSS | |
| 4.15 | QPGLTQPPSASGTPGQRVTISCSGSSSNIGSNYVYWYQQLPGTAPKLLIYR | 1164 |
| | NNQRPSGVPDRLSGSKSGTSASLAISGLRSEDEADYYCAAWDDSLSGWVFG | |
| | GGTKLTVLGATPPETGAETESPGETTGGSAESEPPGEGQVQLVQWGGGLVK | |
| | PGGSLRLSCAASGFTFSSYSMNWVRQAPGKGLEWVSRINSDGSSTNYADSV | |
| | KGRFTISRDNAKNTLYLQMNSLRAEDTAVYYCARELRWGNWGQGTLVTVSS | |
| 4.16 | QAVLTQPPSASGTPGQRVTISCSGSSSNIGSYYVYWYQQVPGAAPKLLMRL | 1165 |
| | NNQRPSGVPDRFSGAKSGTSASLVISGLRSEDEADYYCAAWDDSLSGQWVF | |
| | GGGTKLTVLGATPPETGAETESPGETTGGSAESEPPGEGQVQLQQWGGGLV | |
| | KPGGSLRLSCAASGFTFSSYSMNWVRQAPGKGLEWVSRINSDGSSTNYADS | |
| | VKGRFTISRDNAKNTLYLQMNSLRAEDTAVYYCARELRWGNWGQGTLVTVS | |
| | S | |
| 4.17 | QAGLTQPPSASGTPGQRVTISCSGSSSNIGSNYVYWYQQLPGTAPKLLIYR | 1166 |
| | NNQRPSGVPDRFSGSKSGTSASLAISGLRSEDEADYYCATWDASLSGWVFG | |
| | GGTKLTVLGATPPETGAETESPGETTGGSAESEPPGEGEVQLVQWGGGLVK | |
| | PGGSLRLSCAASGFTFSSYSMNWVRQAPGKGLEWVSRINSDGSSTNYADSV | |
| | KGRFTISRDNAKNTLYLQMNSLRAEDTAVYYCARELRWGNWGQGTLVTVSS | |

### III). Release Segments

[0171] In another aspect, the disclosure relates to release segment (RS) peptides suitable for inclusion in the subject compositions described herein that are substrates for one or more mammalian proteases associated with or produced by disease tissues or cells found in proximity to disease tissues. Such proteases can include, but not be limited to the classes of proteases such as metalloproteinases, cysteine proteases, aspartate proteases, and serine proteases. The RS are useful for, amongst other things, conferring a prodrug format on the subject compositions that can be activated by the cleavage of the RS by mammalian proteases. As described herein, the RS are incorporated into the subject composition embodiments described herein, linking the incorporated antigen binding fragment to the XTEN (the configurations of which are described more fully, below) such that upon cleavage of the RS by action of the one or more proteases for which the RS are substrates, the antigen binding fragments and XTEN are released from the composition and the antigen binding fragments, no longer shielded by the XTEN, regain their full potential to bind their respective ligands. In a particular feature, the RS serve as substrates for proteases found in close association with or are co-localized with disease tissues or cells, such as but not limited to tumors, cancer cells, and inflammatory tissues, and upon cleavage of the RS, the antigen binding fragments that are otherwise shielded by the XTEN of the subject compositions (and thus have a lower binding affinity for their respective ligands) are released from the composition and regain their full potential to bind the target and/or effector cell ligands. In another embodiment, the RS of the subject polypeptide compositions comprise an amino acid sequence that is a substrate for a cellular protease located within a targeted cell. In another particular feature of the subject compositions described herein, the RS that are substrates for two or three classes of proteases were designed with sequences that are capable of being cleaved in different locations of the RS sequence by the different proteases, with a representative example depicted in FIG. 6. Thus, the RS that are substrates for two, three, or more classes of proteases have two, three, or a plurality of distinct cleavage sites in the RS sequence, but cleavage by a single protease nevertheless results in the release of the antigen binding fragments and the XTEN from the composition comprising the RS.

[0172] In one embodiment, the disclosure provides an activatable polypeptide comprising one or more release segments wherein the release segment is a substrate for cleavage by one or more mammalian proteases. In another embodiment, the present disclosure provides a polypeptide comprising a first release segment (RS1) sequence wherein the RS1 is a substrate for cleavage by a mammalian protease wherein the RS1 is a substrate for a protease selected from the group consisting of legumain, MMP-2, MMP-7, MMP-9, MMP-11, MMP-14, uPA, and matriptase. In other cases, the polypeptides of any of the subject composition embodiments described herein comprise a first release segment (RS1) sequence wherein the RS1 is a substrate for cleavage by one or more mammalian proteases selected from the group consisting of meprin, neprilysin (CD10), PSMA, BMP-1, A disintegrin and metalloproteinases (ADAMs), ADAMS, ADAMS, ADAM10, ADAM12, ADAM15, ADAM17 (TACE), ADAM19, ADAM28 (MDC-L), ADAM with thrombospondin motifs (ADAMTS), ADAMTS1, ADAMTS4, ADAMTS5, MMP-1 (collagenase 1), matrix metalloproteinase-1 (MMP-1), matrix metalloproteinase-2 (MMP-2, gelatinase A), matrix metalloproteinase-3 (MMP-3, stromelysin 1), matrix metalloproteinase-7 (MMP-7, Matrilysin 1), matrix metalloproteinase-8 (MMP-8, collagenase 2), matrix metalloproteinase-9 (MMP-9, gelatinase B), matrix metalloproteinase-10 (MMP-10, stromelysin 2), matrix metalloproteinase-11 (MMP-11, stromelysin 3), matrix metalloproteinase-12 (MMP-12, macrophage elastase), matrix metalloproteinase-13 (MMP-13, collagenase 3), matrix metalloproteinase-14 (MMP-14, MT1-MMP), matrix metalloproteinase-15 (MMP-15, MT2-MMP), matrix metalloproteinase-19 (MMP-19), matrix metalloproteinase-23 (MMP-23, CA-MMP), matrix metalloproteinase-24 (MMP-24, MT5-MMP), matrix metalloproteinase-26 (MMP-26, matrilysin 2), matrix metalloproteinase-27 (MMP-27, CMMP), legumain, cathepsin B, cathepsin C, cathepsin K, cathepsin L, cathepsin S, cathepsin X, cathepsin D, cathepsin E, secretase, urokinase (uPA), tissue-type plasminogen activator (tPA), plasmin, thrombin, prostate-specific antigen (PSA, KLK3), human neutrophil elastase (HNE), elastase, tryptase, Type II transmembrane serine proteases (TTSPs), DESC1, hepsin (HPN), matriptase, matriptase-2, TMPRSS2, TMPRSS3, TMPRSS4 (CAP2), fibroblast activation protein (FAP), kallikrein-related peptidase (KLK family), KLK4, KLK5, KLK6, KLK7, KLK8, KLK10, KLK11, KLK13, and KLK14.

[0173] In another embodiment, the present disclosure provides polypeptides comprising a first release segment (RS1) sequence for incorporation into the subject polypeptide compositions described herein wherein the RS1 is a substrate for cleavage by one or more mammalian proteases wherein the RS1 comprises an amino acid sequence having at least 90%, 91%, 92%, 93%, 94%, 95%, 96%, 97%, 98%, 99%, or 100% sequence identity to a sequence selected from SEQ ID NOs:42-660. In another embodiment, the RS1 comprises an amino acid sequence selected from the sequences of RSR-2089, RSR-2295, RSR-2298, RSR-2488, RSR-2599, RSR-2485, RSR-2486, RSR-2728, RSN-2089, RSN-2295, RSN-2298, RSN-2488, RSN-2599, RSN-2485, RSN-2486, RSN-2728, RSC-2089, RSC-2295, RSC-2298, RSC-2488, RSC-2599, RSC-2485, RSC-2486, and RSC-2728, each of which being forth in Table 5. As described more fully in descriptions of the configurations and properties of the subject polypeptide compositions, below, the release segment is fused between the antigen binding fragment and an XTEN polypeptide such that upon cleavage of the release segment, the XTEN is released from the composition.

[0174] In other embodiments, the disclosure provides polypeptides comprising a first release segment (RS1) sequence and a second release segment (RS2) for incorporation into the subject polypeptide compositions described herein wherein the RS1 and the RS2 are identical. In another embodiment, the present disclosure provides polypeptides comprising a first release segment (RS1) sequence and a second release segment (RS2) for incorporation into the subject polypeptide compositions wherein the RS1 and the RS2 are different. In some cases of the foregoing embodiments, the RS1 and the RS2 are each a substrate for cleavage by a mammalian protease selected from the group consisting of legumain, MMP-2, MMP-7, MMP-9, MMP-11, MMP-14, uPA, and matriptase. In another embodiment, the disclosure provides polypeptides comprising an RS1 and an RS2 sequence for incorporation into the subject polypeptide compositions described herein wherein the RS1 and RS2 are each a substrate for cleavage by one or more mammalian protease wherein the RS1 and RS2 each comprise an amino acid sequence having at least 90%, 91%, 92%, 93%, 94%, 95%, 96%, 97%, 98%, 99%, or 100% sequence identity to a sequence selected from SEQ ID NOs:42-660. In another embodiment, the RS1 and RS2 each comprise an amino acid sequence selected from the sequences of RSR-2089, RSR-2295, RSR-2298, RSR-2488, RSR-2599, RSR-2485, RSR-2486, RSR-2728, RSN-2089, RSN-2295, RSN-2298, RSN-2488, RSN-2599, RSN-2485, RSN-2486, RSN-2728, RSC-2089, RSC-2295, RSC-2298, RSC-2488, RSC-2599, RSC-2485, RSC-2486, and RSC-2728, each of which being set forth in Table 5. As described more fully in paragraphs related to the descriptions of the configurations and properties of the subject polypeptide compositions, below, the release segments are fused between the antigen binding fragment and an XTEN polypeptide such that upon cleavage of each release segment, the adjoining XTEN is released from the composition.

TABLE 5
Release Segments and Amino Acid Sequences

| | | SEQ |
|---|---|---|
| | | ID |
| Name | Amino Acid Sequence | NO: |
| RSR-1517 | EAGRSANHEPLGLVAT | 42 |
| BSRS-A1 | ASGRSTNAGPSGLAGP | 43 |
| BSRS-A2 | ASGRSTNAGPQGLAGQ | 44 |
| BSRS-A3 | ASGRSTNAGPPGLTGP | 45 |
| VP-1 | ASSRGTNAGPAGLTGP | 46 |
| RSR-1752 | ASSRTTNTGPSTLTGP | 47 |
| RSR-1512 | AAGRSDNGTPLELVAP | 48 |
| RSR-1517 | EAGRSANHEPLGLVAT | 42 |
| VP-2 | ASGRGTNAGPAGLTGP | 49 |
| RSR-1018 | LFGRNDNHEPLELGGG | 50 |
| RSR-1053 | TAGRSDNLEPLGLVFG | 51 |
| RSR-1059 | LDGRSDNFHPPELVAG | 52 |
| RSR-1065 | LEGRSDNEEPENLVAG | 53 |
| RSR-1167 | LKGRSDNNAPLALVAG | 54 |
| RSR-1201 | VYSRGTNAGPHGLTGR | 55 |
| RSR-1218 | ANSRGTNKGFAGLIGP | 56 |
| RSR-1226 | ASSRLTNEAPAGLTIP | 57 |
| RSR-1254 | DQSRGTNAGPEGLTDP | 58 |
| RSR-1256 | ESSRGTNIGQGGLTGP | 59 |
| RSR-1261 | SSSRGTNQDPAGLTIP | 60 |
| RSR-1293 | ASSRGQNHSPMGLTGP | 61 |
| RSR-1309 | AYSRGPNAGPAGLEGR | 62 |
| RSR-1326 | ASERGNNAGPANLTGF | 63 |
| RSR-1345 | ASHRGTNPKPAILTGP | 64 |
| RSR-1354 | MSSRRTNANPAQLTGP | 65 |
| RSR-1426 | GAGRTDNHEPLELGAA | 66 |
| RSR-1478 | LAGRSENTAPLELTAG | 67 |
| RSR-1479 | LEGRPDNHEPLALVAS | 68 |
| RSR-1496 | LSGRSDNEEPLALPAG | 69 |
| RSR-1508 | EAGRTDNHEPLELSAP | 70 |
| RSR-1513 | EGGRSDNHGPLELVSG | 71 |
| RSR-1516 | LSGRSDNEAPLELEAG | 72 |
| RSR-1524 | LGGRADNHEPPELGAG | 73 |
| RSR-1622 | PPSRGTNAEPAGLTGE | 74 |
| RSR-1629 | ASTRGENAGPAGLEAP | 75 |
| RSR-1664 | ESSRGTNGAPEGLTGP | 76 |
| RSR-1667 | ASSRATNESPAGLTGE | 77 |
| RSR-1709 | ASSRGENPPPGGLTGP | 78 |
| RSR-1712 | AASRGTNTGPAELTGS | 79 |
| RSR-1727 | AGSRTTNAGPGGLEGP | 80 |
| RSR-1754 | APSRGENAGPATLTGA | 81 |
| RSR-1819 | ESGRAANTGPPTLTAP | 82 |
| RSR-1832 | NPGRAANEGPPGLPGS | 83 |
| RSR-1855 | ESSRAANLTPPELTGP | 84 |
| RSR-1911 | ASGRAANETPPGLTGA | 85 |
| RSR-1929 | NSGRGENLGAPGLTGT | 86 |
| RSR-1951 | TTGRAANLTPAGLTGP | 87 |
| RSR-2295 | EAGRSANHTPAGLTGP | 88 |
| RSR-2298 | ESGRAANTTPAGLTGP | 89 |
| RSR-2038 | TTGRATEAANLTPAGLTGP | 90 |
| RSR-2072 | TTGRAEEAANLTPAGLTGP | 91 |
| RSR-2089 | TTGRAGEAANLTPAGLTGP | 92 |
| RSR-2302 | TTGRATEAANATPAGLTGP | 93 |
| RSR-3047 | TTGRAGEAEGATSAGATGP | 94 |
| RSR-3052 | TTGEAGEAANATSAGATGP | 95 |
| RSR-3043 | TTGEAGEAAGLTPAGLTGP | 96 |
| RSR-3041 | TTGAAGEAANATPAGLTGP | 97 |
| RSR-3044 | TTGRAGEAAGLTPAGLTGP | 98 |
| RSR-3057 | TTGRAGEAANATSAGATGP | 99 |
| RSR-3058 | TTGEAGEAAGATSAGATGP | 100 |
| RSR-2485 | ESGRAANTEPPELGAG | 101 |
| RSR-2486 | ESGRAANTAPEGLTGP | 102 |
| RSR-2488 | EPGRAANHEPSGLTEG | 103 |
| RSR-2599 | ESGRAANHTGAPPGGLTGP | 104 |
| RSR-2706 | TTGRTGEGANATPGGLTGP | 105 |
| RSR-2707 | RTGRSGEAANETPEGLEGP | 106 |
| RSR-2708 | RTGRTGESANETPAGLGGP | 107 |
| RSR-2709 | STGRTGEPANETPAGLSGP | 108 |
| RSR-2710 | TTGRAGEPANATPTGLSGP | 109 |
| RSR-2711 | RTGRPGEGANATPTGLPGP | 110 |
| RSR-2712 | RTGRGGEAANATPSGLGGP | 111 |
| RSR-2713 | STGRSGESANATPGGLGGP | 112 |
| RSR-2714 | RTGRTGEEANATPAGLPGP | 113 |
| RSR-2715 | ATGRPGEPANTTPEGLEGP | 114 |
| RSR-2716 | STGRSGEPANATPGGLTGP | 115 |
| RSR-2717 | PTGRGGEGANTTPTGLPGP | 116 |
| RSR-2718 | PTGRSGEGANATPSGLTGP | 117 |
| RSR-2719 | TTGRASEGANSTPAPLTEP | 118 |
| RSR-2720 | TYGRAAEAANTTPAGLTAP | 119 |
| RSR-2721 | TTGRATEGANATPAELTEP | 120 |
| RSR-2722 | TVGRASEEANTTPASLTGP | 121 |
| RSR-2723 | TTGRAPEAANATPAPLTGP | 122 |
| RSR-2724 | TWGRATEPANATPAPLTSP | 123 |
| RSR-2725 | TVGRASESANATPAELTSP | 124 |
| RSR-2726 | TVGRAPEGANSTPAGLTGP | 125 |
| RSR-2727 | TWGRATEAPNLEPATLTTP | 126 |
| RSR-2728 | TTGRATEAPNLTPAPLTEP | 127 |
| RSR-2729 | TQGRATEAPNLSPAALTSP | 128 |
| RSR-2730 | TQGRAAEAPNLTPATLTAP | 129 |
| RSR-2731 | TSGRAPEATNLAPAPLTGP | 130 |
| RSR-2732 | TQGRAAEAANLTPAGLTEP | 131 |
| RSR-2733 | TTGRAGSAPNLPPTGLTTP | 132 |
| RSR-2734 | TTGRAGGAENLPPEGLTAP | 133 |
| RSR-2735 | TTSRAGTATNLTPEGLTAP | 134 |
| RSR-2736 | TTGRAGTATNLPPSGLTTP | 135 |
| RSR-2737 | TTARAGEAENLSPSGLTAP | 136 |
| RSR-2738 | TTGRAGGAGNLAPGGLTEP | 137 |
| RSR-2739 | TTGRAGTATNLPPEGLTGP | 138 |
| RSR-2740 | TTGRAGGAANLAPTGLTEP | 139 |
| RSR-2741 | TTGRAGTAENLAPSGLTTP | 140 |
| RSR-2742 | TTGRAGSATNLGPGGLTGP | 141 |
| RSR-2743 | TTARAGGAENLTPAGLTEP | 142 |
| RSR-2744 | TTARAGSAENLSPSGLTGP | 143 |
| RSR-2745 | TTARAGGAGNLAPEGLTTP | 144 |
| RSR-2746 | TTSRAGAAENLTPTGLTGP | 145 |
| RSR-2747 | TYGRTTTPGNEPPASLEAE | 146 |
| RSR-2748 | TYSRGESGPNEPPPGLTGP | 147 |
| RSR-2749 | AWGRTGASENETPAPLGGE | 148 |
| RSR-2750 | RWGRAETTPNTPPEGLETE | 149 |
| RSR-2751 | ESGRAANHTGAEPPELGAG | 150 |
| RSR-2754 | TTGRAGEAANLTPAGLTES | 151 |
| RSR-2755 | TTGRAGEAANLTPAALTES | 152 |
| RSR-2756 | TTGRAGEAANLTPAPLTES | 153 |
| RSR-2757 | TTGRAGEAANLTPEPLTES | 154 |
| RSR-2758 | TTGRAGEAANLTPAGLTGA | 155 |
| RSR-2759 | TTGRAGEAANLTPEGLTGA | 156 |
| RSR-2760 | TTGRAGEAANLTPEPLTGA | 157 |
| RSR-2761 | TTGRAGEAANLTPAGLTEA | 158 |
| RSR-2762 | TTGRAGEAANLTPEGLTEA | 159 |
| RSR-2763 | TTGRAGEAANLTPAPLTEA | 160 |
| RSR-2764 | TTGRAGEAANLTPEPLTEA | 161 |
| RSR-2765 | TTGRAGEAANLTPEPLTGP | 162 |
| RSR-2766 | TTGRAGEAANLTPAGLTGG | 163 |
| RSR-2767 | TTGRAGEAANLTPEGLTGG | 164 |
| RSR-2768 | TTGRAGEAANLTPEALTGG | 165 |
| RSR-2769 | TTGRAGEAANLTPEPLTGG | 166 |
| RSR-2770 | TTGRAGEAANLTPAGLTEG | 167 |
| RSR-2771 | TTGRAGEAANLTPEGLTEG | 168 |
| RSR-2772 | TTGRAGEAANLTPAPLTEG | 169 |
| RSR-2773 | TTGRAGEAANLTPEPLTEG | 170 |
| RSN-0001 | GSAPGSAGGYAELRMGGAIATSGSETPGT | 171 |
| RSN-0002 | GSAPGTGGGYAPLRMGGGAATSGSETPGT | 172 |
| RSN-0003 | GSAPGAEGGYAALRMGGEIATSGSETPGT | 173 |
| RSN-0004 | GSAPGGPGGYALLRMGGPAATSGSETPGT | 174 |
| RSN-0005 | GSAPGEAGGYAFLRMGGSIATSGSETPGT | 175 |
| RSN-0006 | GSAPGPGGGYASLRMGGTAATSGSETPGT | 176 |
| RSN-0007 | GSAPGSEGGYATLRMGGAIATSGSETPGT | 177 |
| RSN-0008 | GSAPGTPGGYANLRMGGGAATSGSETPGT | 178 |
| RSN-0009 | GSAPGASGGYAHLRMGGEIATSGSETPGT | 179 |
| RSN-0010 | GSAPGGTGGYGELRMGGPAATSGSETPGT | 180 |
| RSN-0011 | GSAPGEAGGYPELRMGGSIATSGSETPGT | 181 |
| RSN-0012 | GSAPGPGGGYVELRMGGTAATSGSETPGT | 182 |
| RSN-0013 | GSAPGSEGGYLELRMGGAIATSGSETPGT | 183 |
| RSN-0014 | GSAPGTPGGYSELRMGGGAATSGSETPGT | 184 |
| RSN-0015 | GSAPGASGGYTELRMGGEIATSGSETPGT | 185 |
| RSN-0016 | GSAPGGTGGYQELRMGGPAATSGSETPGT | 186 |
| RSN-0017 | GSAPGEAGGYEELRMGGSIATSGSETPGT | 187 |
| RSN-0018 | GSAPGPGIGPAELRMGGTAATSGSETPGT | 188 |
| RSN-0019 | GSAPGSEIGAAELRMGGAIATSGSETPGT | 189 |
| RSN-0020 | GSAPGTPIGSAELRMGGGAATSGSETPGT | 190 |
| RSN-0021 | GSAPGASIGTAELRMGGEIATSGSETPGT | 191 |
| RSN-0022 | GSAPGGTIGNAELRMGGPAATSGSETPGT | 192 |
| RSN-0023 | GSAPGEAIGQAELRMGGSIATSGSETPGT | 193 |
| RSN-0024 | GSAPGPGGPYAELRMGGTAATSGSETPGT | 194 |
| RSN-0025 | GSAPGSEGAYAELRMGGAIATSGSETPGT | 195 |
| RSN-0026 | GSAPGTPGVYAELRMGGGAATSGSETPGT | 196 |
| RSN-0027 | GSAPGASGLYAELRMGGEIATSGSETPGT | 197 |
| RSN-0028 | GSAPGGTGIYAELRMGGPAATSGSETPGT | 198 |
| RSN-0029 | GSAPGEAGFYAELRMGGSIATSGSETPGT | 199 |
| RSN-0030 | GSAPGPGGYYAELRMGGTAATSGSETPGT | 200 |
| RSN-0031 | GSAPGSEGSYAELRMGGAIATSGSETPGT | 201 |
| RSN-0032 | GSAPGTPGNYAELRMGGGAATSGSETPGT | 202 |
| RSN-0033 | GSAPGASGEYAELRMGGEIATSGSETPGT | 203 |
| RSN-0034 | GSAPGGTGHYAELRMGGPAATSGSETPGT | 204 |
| RSN-0035 | GSAPGEAGGYAEARMGGSIATSGSETPGT | 205 |
| RSN-0036 | GSAPGPGGGYAEVRMGGTAATSGSETPGT | 206 |
| RSN-0037 | GSAPGSEGGYAEIRMGGAIATSGSETPGT | 207 |
| RSN-0038 | GSAPGTPGGYAEFRMGGGAATSGSETPGT | 208 |
| RSN-0039 | GSAPGASGGYAEYRMGGEIATSGSETPGT | 209 |
| RSN-0040 | GSAPGGTGGYAESRMGGPAATSGSETPGT | 210 |
| RSN-0041 | GSAPGEAGGYAETRMGGSIATSGSETPGT | 211 |
| RSN-0042 | GSAPGPGGGYAELAMGGTRATSGSETPGT | 212 |
| RSN-0043 | GSAPGSEGGYAELVMGGARATSGSETPGT | 213 |
| RSN-0044 | GSAPGTPGGYAELLMGGGRATSGSETPGT | 214 |
| RSN-0045 | GSAPGASGGYAELIMGGERATSGSETPGT | 215 |
| RSN-0046 | GSAPGGTGGYAELWMGGPRATSGSETPGT | 216 |
| RSN-0047 | GSAPGEAGGYAELSMGGSRATSGSETPGT | 217 |
| RSN-0048 | GSAPGPGGGYAELTMGGTRATSGSETPGT | 218 |
| RSN-0049 | GSAPGSEGGYAELQMGGARATSGSETPGT | 219 |
| RSN-0050 | GSAPGTPGGYAELNMGGGRATSGSETPGT | 220 |
| RSN-0051 | GSAPGASGGYAELEMGGERATSGSETPGT | 221 |
| RSN-0052 | GSAPGGTGGYAELRPGGPIATSGSETPGT | 222 |
| RSN-0053 | GSAPGEAGGYAELRAGGSAATSGSETPGT | 223 |
| RSN-0054 | GSAPGPGGGYAELRLGGTIATSGSETPGT | 224 |
| RSN-0055 | GSAPGSEGGYAELRIGGAAATSGSETPGT | 225 |
| RSN-0056 | GSAPGTPGGYAELRSGGGIATSGSETPGT | 226 |
| RSN-0057 | GSAPGASGGYAELRNGGEAATSGSETPGT | 227 |
| RSN-0058 | GSAPGGTGGYAELRQGGPIATSGSETPGT | 228 |
| RSN-0059 | GSAPGEAGGYAELRDGGSAATSGSETPGT | 229 |
| RSN-0060 | GSAPGPGGGYAELREGGTIATSGSETPGT | 230 |
| RSN-0061 | GSAPGSEGGYAELRHGGAAATSGSETPGT | 231 |
| RSN-0062 | GSAPGTPGGYAELRMPGGIATSGSETPGT | 232 |
| RSN-0063 | GSAPGASGGYAELRMAGEAATSGSETPGT | 233 |
| RSN-0064 | GSAPGGTGGYAELRMVGPIATSGSETPGT | 234 |
| RSN-0065 | GSAPGEAGGYAELRMLGSAATSGSETPGT | 235 |
| RSN-0066 | GSAPGPGGGYAELRMIGTIATSGSETPGT | 236 |
| RSN-0067 | GSAPGSEGGYAELRMYGAIATSGSETPGT | 237 |
| RSN-0068 | GSAPGTPGGYAELRMSGGAATSGSETPGT | 238 |
| RSN-0069 | GSAPGASGGYAELRMNGEIATSGSETPGT | 239 |
| RSN-0070 | GSAPGGTGGYAELRMQGPAATSGSETPGT | 240 |
| RSN-0071 | GSAPGANHTPAGLTGPGARATSGSETPGT | 241 |
| RSN-0072 | GSAPGANTAPEGLTGPSTRATSGSETPGT | 242 |
| RSN-0073 | GSAPGTGAPPGGLTGPGTRATSGSETPGT | 243 |
| RSN-0074 | GSAPGANHEPSGLTEGSPRATSGSETPGT | 244 |
| RSN-0075 | GSAPGANTEPPELGAGTERATSGSETPGT | 245 |
| RSN-0076 | GSAPGASGPPPGLTGPPGRATSGSETPGT | 246 |
| RSN-0077 | GSAPGASGTPAPLGGEPGRATSGSETPGT | 247 |
| RSN-0078 | GSAPGPAGPPEGLETEAGRATSGSETPGT | 248 |
| RSN-0079 | GSAPGPTSGQGGLTGPESRATSGSETPGT | 249 |
| RSN-0080 | GSAPGSAGGAANLVRGGAIATSGSETPGT | 250 |
| RSN-0081 | GSAPGTGGGAAPLVRGGGAATSGSETPGT | 251 |
| RSN-0082 | GSAPGAEGGAAALVRGGEIATSGSETPGT | 252 |
| RSN-0083 | GSAPGGPGGAALLVRGGPAATSGSETPGT | 253 |
| RSN-0084 | GSAPGEAGGAAFLVRGGSIATSGSETPGT | 254 |
| RSN-0085 | GSAPGPGGGAASLVRGGTAATSGSETPGT | 255 |
| RSN-0086 | GSAPGSEGGAATLVRGGAIATSGSETPGT | 256 |
| RSN-0087 | GSAPGTPGGAAGLVRGGGAATSGSETPGT | 257 |
| RSN-0088 | GSAPGASGGAADLVRGGEIATSGSETPGT | 258 |
| RSN-0089 | GSAPGGTGGAGNLVRGGPAATSGSETPGT | 259 |
| RSN-0090 | GSAPGEAGGAPNLVRGGSIATSGSETPGT | 260 |
| RSN-0091 | GSAPGPGGGAVNLVRGGTAATSGSETPGT | 261 |
| RSN-0092 | GSAPGSEGGALNLVRGGAIATSGSETPGT | 262 |
| RSN-0093 | GSAPGTPGGASNLVRGGGAATSGSETPGT | 263 |
| RSN-0094 | GSAPGASGGATNLVRGGEIATSGSETPGT | 264 |
| RSN-0095 | GSAPGGTGGAQNLVRGGPAATSGSETPGT | 265 |
| RSN-0096 | GSAPGEAGGAENLVRGGSIATSGSETPGT | 266 |
| RSN-1517 | GSAPEAGRSANHEPLGLVATATSGSETPGT | 267 |
| BSRS-A1-2 | GSAPASGRSTNAGPSGLAGPATSGSETPGT | 268 |
| BSRS-A2-2 | GSAPASGRSTNAGPQGLAGQATSGSETPGT | 269 |
| BSRS-A3-2 | GSAPASGRSTNAGPPGLTGPATSGSETPGT | 270 |
| VP-1-2 | GSAPASSRGTNAGPAGLTGPATSGSETPGT | 271 |
| RSN-1752 | GSAPASSRTTNTGPSTLTGPATSGSETPGT | 272 |
| RSN-1512 | GSAPAAGRSDNGTPLELVAPATSGSETPGT | 273 |
| RSN-1517 | GSAPEAGRSANHEPLGLVATATSGSETPGT | 267 |
| VP-2-2 | GSAPASGRGTNAGPAGLTGPATSGSETPGT | 274 |
| RSN-1018 | GSAPLFGRNDNHEPLELGGGATSGSETPGT | 275 |
| RSN-1053 | GSAPTAGRSDNLEPLGLVFGATSGSETPGT | 276 |
| RSN-1059 | GSAPLDGRSDNFHPPELVAGATSGSETPGT | 277 |
| RSN-1065 | GSAPLEGRSDNEEPENLVAGATSGSETPGT | 278 |
| RSN-1167 | GSAPLKGRSDNNAPLALVAGATSGSETPGT | 279 |
| RSN-1201 | GSAPVYSRGTNAGPHGLTGRATSGSETPGT | 280 |
| RSN-1218 | GSAPANSRGTNKGFAGLIGPATSGSETPGT | 281 |
| RSN-1226 | GSAPASSRLTNEAPAGLTIPATSGSETPGT | 282 |
| RSN-1254 | GSAPDQSRGTNAGPEGLTDPATSGSETPGT | 283 |
| RSN-1256 | GSAPESSRGTNIGQGGLTGPATSGSETPGT | 284 |
| RSN-1261 | GSAPSSSRGTNQDPAGLTIPATSGSETPGT | 285 |
| RSN-1293 | GSAPASSRGQNHSPMGLTGPATSGSETPGT | 286 |
| RSN-1309 | GSAPAYSRGPNAGPAGLEGRATSGSETPGT | 287 |
| RSN-1326 | GSAPASERGNNAGPANLTGFATSGSETPGT | 288 |
| RSN-1345 | GSAPASHRGTNPKPAILTGPATSGSETPGT | 289 |
| RSN-1354 | GSAPMSSRRTNANPAQLTGPATSGSETPGT | 290 |
| RSN-1426 | GSAPGAGRTDNHEPLELGAAATSGSETPGT | 291 |
| RSN-1478 | GSAPLAGRSENTAPLELTAGATSGSETPGT | 292 |
| RSN-1479 | GSAPLEGRPDNHEPLALVASATSGSETPGT | 293 |
| RSN-1496 | GSAPLSGRSDNEEPLALPAGATSGSETPGT | 294 |
| RSN-1508 | GSAPEAGRTDNHEPLELSAPATSGSETPGT | 295 |
| RSN-1513 | GSAPEGGRSDNHGPLELVSGATSGSETPGT | 296 |
| RSN-1516 | GSAPLSGRSDNEAPLELEAGATSGSETPGT | 297 |
| RSN-1524 | GSAPLGGRADNHEPPELGAGATSGSETPGT | 298 |
| RSN-1622 | GSAPPPSRGTNAEPAGLTGEATSGSETPGT | 299 |
| RSN-1629 | GSAPASTRGENAGPAGLEAPATSGSETPGT | 300 |
| RSN-1664 | GSAPESSRGTNGAPEGLTGPATSGSETPGT | 301 |
| RSN-1667 | GSAPASSRATNESPAGLTGEATSGSETPGT | 302 |
| RSN-1709 | GSAPASSRGENPPPGGLTGPATSGSETPGT | 303 |
| RSN-1712 | GSAPAASRGTNTGPAELTGSATSGSETPGT | 304 |
| RSN-1727 | GSAPAGSRTTNAGPGGLEGPATSGSETPGT | 305 |
| RSN-1754 | GSAPAPSRGENAGPATLTGAATSGSETPGT | 306 |
| RSN-1819 | GSAPESGRAANTGPPTLTAPATSGSETPGT | 307 |
| RSN-1832 | GSAPNPGRAANEGPPGLPGSATSGSETPGT | 308 |
| RSN-1855 | GSAPESSRAANLTPPELTGPATSGSETPGT | 309 |
| RSN-1911 | GSAPASGRAANETPPGLTGAATSGSETPGT | 310 |
| RSN-1929 | GSAPNSGRGENLGAPGLTGTATSGSETPGT | 311 |
| RSN-1951 | GSAPTTGRAANLTPAGLTGPATSGSETPGT | 312 |
| RSN-2295 | GSAPEAGRSANHTPAGLTGPATSGSETPGT | 313 |
| RSN-2298 | GSAPESGRAANTTPAGLTGPATSGSETPGT | 314 |
| RSN-2038 | GSAPTTGRATEAANLTPAGLTGPATSGSETPGT | 315 |
| RSN-2072 | GSAPTTGRAEEAANLTPAGLTGPATSGSETPGT | 316 |
| RSN-2089 | GSAPTTGRAGEAANLTPAGLTGPATSGSETPGT | 317 |
| RSN-2302 | GSAPTTGRATEAANATPAGLTGPATSGSETPGT | 318 |
| RSN-3047 | GSAPTTGRAGEAEGATSAGATGPATSGSETPGT | 319 |
| RSN-3052 | GSAPTTGEAGEAANATSAGATGPATSGSETPGT | 320 |
| RSN-3043 | GSAPTTGEAGEAAGLTPAGLTGPATSGSETPGT | 321 |
| RSN-3041 | GSAPTTGAAGEAANATPAGLTGPATSGSETPGT | 322 |
| RSN-3044 | GSAPTTGRAGEAAGLTPAGLTGPATSGSETPGT | 323 |
| RSN-3057 | GSAPTTGRAGEAANATSAGATGPATSGSETPGT | 324 |
| RSN-3058 | GSAPTTGEAGEAAGATSAGATGPATSGSETPGT | 325 |
| RSN-2485 | GSAPESGRAANTEPPELGAGATSGSETPGT | 326 |
| RSN-2486 | GSAPESGRAANTAPEGLTGPATSGSETPGT | 327 |
| RSN-2488 | GSAPEPGRAANHEPSGLTEGATSGSETPGT | 328 |
| RSN-2599 | GSAPESGRAANHTGAPPGGLTGPATSGSETPGT | 329 |
| RSN-2706 | GSAPTTGRTGEGANATPGGLTGPATSGSETPGT | 330 |
| RSN-2707 | GSAPRTGRSGEAANETPEGLEGPATSGSETPGT | 331 |
| RSN-2708 | GSAPRTGRTGESANETPAGLGGPATSGSETPGT | 332 |
| RSN-2709 | GSAPSTGRTGEPANETPAGLSGPATSGSETPGT | 333 |
| RSN-2710 | GSAPTTGRAGEPANATPTGLSGPATSGSETPGT | 334 |
| RSN-2711 | GSAPRTGRPGEGANATPTGLPGPATSGSETPGT | 335 |
| RSN-2712 | GSAPRTGRGGEAANATPSGLGGPATSGSETPGT | 336 |
| RSN-2713 | GSAPSTGRSGESANATPGGLGGPATSGSETPGT | 337 |
| RSN-2714 | GSAPRTGRTGEEANATPAGLPGPATSGSETPGT | 338 |
| RSN-2715 | GSAPATGRPGEPANTTPEGLEGPATSGSETPGT | 339 |
| RSN-2716 | GSAPSTGRSGEPANATPGGLTGPATSGSETPGT | 340 |
| RSN-2717 | GSAPPTGRGGEGANTTPTGLPGPATSGSETPGT | 341 |
| RSN-2718 | GSAPPTGRSGEGANATPSGLTGPATSGSETPGT | 342 |
| RSN-2719 | GSAPTTGRASEGANSTPAPLTEPATSGSETPGT | 343 |
| RSN-2720 | GSAPTYGRAAEAANTTPAGLTAPATSGSETPGT | 344 |
| RSN-2721 | GSAPTTGRATEGANATPAELTEPATSGSETPGT | 345 |
| RSN-2722 | GSAPTVGRASEEANTTPASLTGPATSGSETPGT | 346 |
| RSN-2723 | GSAPTTGRAPEAANATPAPLTGPATSGSETPGT | 347 |
| RSN-2724 | GSAPTWGRATEPANATPAPLTSPATSGSETPGT | 348 |
| RSN-2725 | GSAPTVGRASESANATPAELTSPATSGSETPGT | 349 |
| RSN-2726 | GSAPTVGRAPEGANSTPAGLTGPATSGSETPGT | 350 |
| RSN-2727 | GSAPTWGRATEAPNLEPATLTTPATSGSETPGT | 351 |
| RSN-2728 | GSAPTTGRATEAPNLTPAPLTEPATSGSETPGT | 352 |
| RSN-2729 | GSAPTQGRATEAPNLSPAALTSPATSGSETPGT | 353 |
| RSN-2730 | GSAPTQGRAAEAPNLTPATLTAPATSGSETPGT | 354 |
| RSN-2731 | GSAPTSGRAPEATNLAPAPLTGPATSGSETPGT | 355 |
| RSN-2732 | GSAPTQGRAAEAANLTPAGLTEPATSGSETPGT | 356 |
| RSN-2733 | GSAPTTGRAGSAPNLPPTGLTTPATSGSETPGT | 357 |
| RSN-2734 | GSAPTTGRAGGAENLPPEGLTAPATSGSETPGT | 358 |
| RSN-2735 | GSAPTTSRAGTATNLTPEGLTAPATSGSETPGT | 359 |
| RSN-2736 | GSAPTTGRAGTATNLPPSGLTTPATSGSETPGT | 360 |
| RSN-2737 | GSAPTTARAGEAENLSPSGLTAPATSGSETPGT | 361 |
| RSN-2738 | GSAPTTGRAGGAGNLAPGGLTEPATSGSETPGT | 362 |
| RSN-2739 | GSAPTTGRAGTATNLPPEGLTGPATSGSETPGT | 363 |
| RSN-2740 | GSAPTTGRAGGAANLAPTGLTEPATSGSETPGT | 364 |
| RSN-2741 | GSAPTTGRAGTAENLAPSGLTTPATSGSETPGT | 365 |
| RSN-2742 | GSAPTTGRAGSATNLGPGGLTGPATSGSETPGT | 366 |
| RSN-2743 | GSAPTTARAGGAENLTPAGLTEPATSGSETPGT | 367 |
| RSN-2744 | GSAPTTARAGSAENLSPSGLTGPATSGSETPGT | 368 |
| RSN-2745 | GSAPTTARAGGAGNLAPEGLTTPATSGSETPGT | 369 |
| RSN-2746 | GSAPTTSRAGAAENLTPTGLTGPATSGSETPGT | 370 |
| RSN-2747 | GSAPTYGRTTTPGNEPPASLEAEATSGSETPGT | 371 |
| RSN-2748 | GSAPTYSRGESGPNEPPPGLTGPATSGSETPGT | 372 |
| RSN-2749 | GSAPAWGRTGASENETPAPLGGEATSGSETPGT | 373 |
| RSN-2750 | GSAPRWGRAETTPNTPPEGLETEATSGSETPGT | 374 |
| RSN-2751 | GSAPESGRAANHTGAEPPELGAGATSGSETPGT | 375 |
| RSN-2754 | GSAPTTGRAGEAANLTPAGLTESATSGSETPGT | 376 |
| RSN-2755 | GSAPTTGRAGEAANLTPAALTESATSGSETPGT | 377 |
| RSN-2756 | GSAPTTGRAGEAANLTPAPLTESATSGSETPGT | 378 |
| RSN-2757 | GSAPTTGRAGEAANLTPEPLTESATSGSETPGT | 379 |
| RSN-2758 | GSAPTTGRAGEAANLTPAGLTGAATSGSETPGT | 380 |
| RSN-2759 | GSAPTTGRAGEAANLTPEGLTGAATSGSETPGT | 381 |
| RSN-2760 | GSAPTTGRAGEAANLTPEPLTGAATSGSETPGT | 382 |
| RSN-2761 | GSAPTTGRAGEAANLTPAGLTEAATSGSETPGT | 383 |
| RSN-2762 | GSAPTTGRAGEAANLTPEGLTEAATSGSETPGT | 384 |
| RSN-2763 | GSAPTTGRAGEAANLTPAPLTEAATSGSETPGT | 385 |
| RSN-2764 | GSAPTTGRAGEAANLTPEPLTEAATSGSETPGT | 386 |
| RSN-2765 | GSAPTTGRAGEAANLTPEPLTGPATSGSETPGT | 387 |
| RSN-2766 | GSAPTTGRAGEAANLTPAGLTGGATSGSETPGT | 388 |
| RSN-2767 | GSAPTTGRAGEAANLTPEGLTGGATSGSETPGT | 389 |
| RSN-2768 | GSAPTTGRAGEAANLTPEALTGGATSGSETPGT | 390 |
| RSN-2769 | GSAPTTGRAGEAANLTPEPLTGGATSGSETPGT | 391 |
| RSN-2770 | GSAPTTGRAGEAANLTPAGLTEGATSGSETPGT | 392 |
| RSN-2771 | GSAPTTGRAGEAANLTPEGLTEGATSGSETPGT | 393 |
| RSN-2772 | GSAPTTGRAGEAANLTPAPLTEGATSGSETPGT | 394 |
| RSN-2773 | GSAPTTGRAGEAANLTPEPLTEGATSGSETPGT | 395 |
| RSN-3047 | GSAPTTGRAGEAEGATSAGATGPATSGSETPGT | 319 |
| RSN-2783 | GSAPEAGRSAEATSAGATGPATSGSETPGT | 396 |
| RSN-3107 | GSAPSASGTYSRGESGPGSPATSGSETPGT | 397 |
| RSN-3103 | GSAPSASGEAGRTDTHPGSPATSGSETPGT | 398 |
| RSN-3102 | GSAPSASGEPGRAAEHPGSPATSGSETPGT | 399 |
| RSN-3119 | GSAPSPAGESSRGTTTAGSPATSGSETPGT | 400 |
| RSN-3043 | GSAPTTGEAGEAAGLTPAGLTGPATSGSETPGT | 321 |
| RSN-2789 | GSAPEAGESAGATPAGLTGPATSGSETPGT | 401 |
| RSN-3109 | GSAPSASGAPLELEAGPGSPATSGSETPGT | 402 |
| RSN-3110 | GSAPSASGEPPELGAGPGSPATSGSETPGT | 403 |
| RSN-3111 | GSAPSASGEPSGLTEGPGSPATSGSETPGT | 404 |
| RSN-3112 | GSAPSASGTPAPLTEPPGSPATSGSETPGT | 405 |
| RSN-3113 | GSAPSASGTPAELTEPPGSPATSGSETPGT | 406 |
| RSN-3114 | GSAPSASGPPPGLTGPPGSPATSGSETPGT | 407 |
| RSN-3115 | GSAPSASGTPAPLGGEPGSPATSGSETPGT | 408 |
| RSN-3125 | GSAPSPAGAPEGLTGPAGSPATSGSETPGT | 409 |
| RSN-3126 | GSAPSPAGPPEGLETEAGSPATSGSETPGT | 410 |
| RSN-3127 | GSAPSPTSGQGGLTGPGSEPATSGSETPGT | 411 |
| RSN-3131 | GSAPSESAPPEGLETESTEPATSGSETPGT | 412 |
| RSN-3132 | GSAPSEGSEPLELGAASETPATSGSETPGT | 413 |
| RSN-3133 | GSAPSEGSGPAGLEAPSETPATSGSETPGT | 414 |
| RSN-3138 | GSAPSEPTPPASLEAEPGSPATSGSETPGT | 415 |
| RSC-0001 | GTAEAASASGGSAGGYAELRMGGAIPGSP | 416 |
| RSC-0002 | GTAEAASASGGTGGGYAPLRMGGGAPGSP | 417 |
| RSC-0003 | GTAEAASASGGAEGGYAALRMGGEIPGSP | 418 |
| RSC-0004 | GTAEAASASGGGPGGYALLRMGGPAPGSP | 419 |
| RSC-0005 | GTAEAASASGGEAGGYAFLRMGGSIPGSP | 420 |
| RSC-0006 | GTAEAASASGGPGGGYASLRMGGTAPGSP | 421 |
| RSC-0007 | GTAEAASASGGSEGGYATLRMGGAIPGSP | 422 |
| RSC-0008 | GTAEAASASGGTPGGYANLRMGGGAPGSP | 423 |
| RSC-0009 | GTAEAASASGGASGGYAHLRMGGEIPGSP | 424 |
| RSC-0010 | GTAEAASASGGGTGGYGELRMGGPAPGSP | 425 |
| RSC-0011 | GTAEAASASGGEAGGYPELRMGGSIPGSP | 426 |
| RSC-0012 | GTAEAASASGGPGGGYVELRMGGTAPGSP | 427 |
| RSC-0013 | GTAEAASASGGSEGGYLELRMGGAIPGSP | 428 |
| RSC-0014 | GTAEAASASGGTPGGYSELRMGGGAPGSP | 429 |
| RSC-0015 | GTAEAASASGGASGGYTELRMGGEIPGSP | 430 |
| RSC-0016 | GTAEAASASGGGTGGYQELRMGGPAPGSP | 431 |
| RSC-0017 | GTAEAASASGGEAGGYEELRMGGSIPGSP | 432 |
| RSC-0018 | GTAEAASASGGPGIGPAELRMGGTAPGSP | 433 |
| RSC-0019 | GTAEAASASGGSEIGAAELRMGGAIPGSP | 434 |
| RSC-0020 | GTAEAASASGGTPIGSAELRMGGGAPGSP | 435 |
| RSC-0021 | GTAEAASASGGASIGTAELRMGGEIPGSP | 436 |
| RSC-0022 | GTAEAASASGGGTIGNAELRMGGPAPGSP | 437 |
| RSC-0023 | GTAEAASASGGEAIGQAELRMGGSIPGSP | 438 |
| RSC-0024 | GTAEAASASGGPGGPYAELRMGGTAPGSP | 439 |
| RSC-0025 | GTAEAASASGGSEGAYAELRMGGAIPGSP | 440 |
| RSC-0026 | GTAEAASASGGTPGVYAELRMGGGAPGSP | 441 |
| RSC-0027 | GTAEAASASGGASGLYAELRMGGEIPGSP | 442 |
| RSC-0028 | GTAEAASASGGGTGIYAELRMGGPAPGSP | 443 |
| RSC-0029 | GTAEAASASGGEAGFYAELRMGGSIPGSP | 444 |
| RSC-0030 | GTAEAASASGGPGGYYAELRMGGTAPGSP | 445 |
| RSC-0031 | GTAEAASASGGSEGSYAELRMGGAIPGSP | 446 |
| RSC-0032 | GTAEAASASGGTPGNYAELRMGGGAPGSP | 447 |
| RSC-0033 | GTAEAASASGGASGEYAELRMGGEIPGSP | 448 |
| RSC-0034 | GTAEAASASGGGTGHYAELRMGGPAPGSP | 449 |
| RSC-0035 | GTAEAASASGGEAGGYAEARMGGSIPGSP | 450 |
| RSC-0036 | GTAEAASASGGPGGGYAEVRMGGTAPGSP | 451 |
| RSC-0037 | GTAEAASASGGSEGGYAEIRMGGAIPGSP | 452 |
| RSC-0038 | GTAEAASASGGTPGGYAEFRMGGGAPGSP | 453 |
| RSC-0039 | GTAEAASASGGASGGYAEYRMGGEIPGSP | 454 |
| RSC-0040 | GTAEAASASGGGTGGYAESRMGGPAPGSP | 455 |
| RSC-0041 | GTAEAASASGGEAGGYAETRMGGSIPGSP | 456 |
| RSC-0042 | GTAEAASASGGPGGGYAELAMGGTRPGSP | 457 |
| RSC-0043 | GTAEAASASGGSEGGYAELVMGGARPGSP | 458 |
| RSC-0044 | GTAEAASASGGTPGGYAELLMGGGRPGSP | 459 |
| RSC-0045 | GTAEAASASGGASGGYAELIMGGERPGSP | 460 |
| RSC-0046 | GTAEAASASGGGTGGYAELWMGGPRPGSP | 461 |
| RSC-0047 | GTAEAASASGGEAGGYAELSMGGSRPGSP | 462 |
| RSC-0048 | GTAEAASASGGPGGGYAELTMGGTRPGSP | 463 |
| RSC-0049 | GTAEAASASGGSEGGYAELQMGGARPGSP | 464 |
| RSC-0050 | GTAEAASASGGTPGGYAELNMGGGRPGSP | 465 |
| RSC-0051 | GTAEAASASGGASGGYAELEMGGERPGSP | 466 |
| RSC-0052 | GTAEAASASGGGTGGYAELRPGGPIPGSP | 467 |
| RSC-0053 | GTAEAASASGGEAGGYAELRAGGSAPGSP | 468 |
| RSC-0054 | GTAEAASASGGPGGGYAELRLGGTIPGSP | 469 |
| RSC-0055 | GTAEAASASGGSEGGYAELRIGGAAPGSP | 470 |
| RSC-0056 | GTAEAASASGGTPGGYAELRSGGGIPGSP | 471 |
| RSC-0057 | GTAEAASASGGASGGYAELRNGGEAPGSP | 472 |
| RSC-0058 | GTAEAASASGGGTGGYAELRQGGPIPGSP | 473 |
| RSC-0059 | GTAEAASASGGEAGGYAELRDGGSAPGSP | 474 |
| RSC-0060 | GTAEAASASGGPGGGYAELREGGTIPGSP | 475 |
| RSC-0061 | GTAEAASASGGSEGGYAELRHGGAAPGSP | 476 |
| RSC-0062 | GTAEAASASGGTPGGYAELRMPGGIPGSP | 477 |
| RSC-0063 | GTAEAASASGGASGGYAELRMAGEAPGSP | 478 |
| RSC-0064 | GTAEAASASGGGTGGYAELRMVGPIPGSP | 479 |
| RSC-0065 | GTAEAASASGGEAGGYAELRMLGSAPGSP | 480 |
| RSC-0066 | GTAEAASASGGPGGGYAELRMIGTIPGSP | 481 |
| RSC-0067 | GTAEAASASGGSEGGYAELRMYGAIPGSP | 482 |
| RSC-0068 | GTAEAASASGGTPGGYAELRMSGGAPGSP | 483 |
| RSC-0069 | GTAEAASASGGASGGYAELRMNGEIPGSP | 484 |
| RSC-0070 | GTAEAASASGGGTGGYAELRMQGPAPGSP | 485 |
| RSC-0071 | GTAEAASASGGANHTPAGLTGPGARPGSP | 486 |
| RSC-0072 | GTAEAASASGGANTAPEGLTGPSTRPGSP | 487 |
| RSC-0073 | GTAEAASASGGTGAPPGGLTGPGTRPGSP | 488 |
| RSC-0074 | GTAEAASASGGANHEPSGLTEGSPRPGSP | 489 |
| RSC-0075 | GTAEAASASGGANTEPPELGAGTERPGSP | 490 |
| RSC-0076 | GTAEAASASGGASGPPPGLTGPPGRPGSP | 491 |
| RSC-0077 | GTAEAASASGGASGTPAPLGGEPGRPGSP | 492 |
| RSC-0078 | GTAEAASASGGPAGPPEGLETEAGRPGSP | 493 |
| RSC-0079 | GTAEAASASGGPTSGQGGLTGPESRPGSP | 494 |
| RSC-0080 | GTAEAASASGGSAGGAANLVRGGAIPGSP | 495 |
| RSC-0081 | GTAEAASASGGTGGGAAPLVRGGGAPGSP | 496 |
| RSC-0082 | GTAEAASASGGAEGGAAALVRGGEIPGSP | 497 |
| RSC-0083 | GTAEAASASGGGPGGAALLVRGGPAPGSP | 498 |
| RSC-0084 | GTAEAASASGGEAGGAAFLVRGGSIPGSP | 499 |
| RSC-0085 | GTAEAASASGGPGGGAASLVRGGTAPGSP | 500 |
| RSC-0086 | GTAEAASASGGSEGGAATLVRGGAIPGSP | 501 |
| RSC-0087 | GTAEAASASGGTPGGAAGLVRGGGAPGSP | 502 |
| RSC-0088 | GTAEAASASGGASGGAADLVRGGEIPGSP | 503 |
| RSC-0089 | GTAEAASASGGGTGGAGNLVRGGPAPGSP | 504 |
| RSC-0090 | GTAEAASASGGEAGGAPNLVRGGSIPGSP | 505 |
| RSC-0091 | GTAEAASASGGPGGGAVNLVRGGTAPGSP | 506 |
| RSC-0092 | GTAEAASASGGSEGGALNLVRGGAIPGSP | 507 |
| RSC-0093 | GTAEAASASGGTPGGASNLVRGGGAPGSP | 508 |
| RSC-0094 | GTAEAASASGGASGGATNLVRGGEIPGSP | 509 |
| RSC-0095 | GTAEAASASGGGTGGAQNLVRGGPAPGSP | 510 |
| RSC-0096 | GTAEAASASGGEAGGAENLVRGGSIPGSP | 511 |
| RSC-1517 | GTAEAASASGEAGRSANHEPLGLVATPGSP | 512 |
| BSRS-A1-3 | GTAEAASASGASGRSTNAGPSGLAGPPGSP | 513 |
| BSRS-A2-3 | GTAEAASASGASGRSTNAGPQGLAGQPGSP | 514 |
| BSRS-A3-3 | GTAEAASASGASGRSTNAGPPGLTGPPGSP | 515 |
| VP-1-2 | GTAEAASASGASSRGTNAGPAGLTGPPGSP | 516 |
| RSC-1752-2 | GTAEAASASGASSRTTNTGPSTLTGPPGSP | 517 |
| RSC-1512 | GTAEAASASGAAGRSDNGTPLELVAPPGSP | 518 |
| RSC-1517 | GTAEAASASGEAGRSANHEPLGLVATPGSP | 512 |
| VP-2-2 | GTAEAASASGASGRGTNAGPAGLTGPPGSP | 519 |
| RSC-1018 | GTAEAASASGLFGRNDNHEPLELGGGPGSP | 520 |
| RSC-1053 | GTAEAASASGTAGRSDNLEPLGLVFGPGSP | 521 |
| RSC-1059 | GTAEAASASGLDGRSDNFHPPELVAGPGSP | 522 |
| RSC-1065 | GTAEAASASGLEGRSDNEEPENLVAGPGSP | 523 |
| RSC-1167 | GTAEAASASGLKGRSDNNAPLALVAGPGSP | 524 |
| RSC-1201 | GTAEAASASGVYSRGTNAGPHGLTGRPGSP | 525 |
| RSC-1218 | GTAEAASASGANSRGTNKGFAGLIGPPGSP | 526 |
| RSC-1226 | GTAEAASASGASSRLTNEAPAGLTIPPGSP | 527 |
| RSC-1254 | GTAEAASASGDQSRGTNAGPEGLTDPPGSP | 528 |
| RSC-1256 | GTAEAASASGESSRGTNIGQGGLTGPPGSP | 529 |
| RSC-1261 | GTAEAASASGSSSRGTNQDPAGLTIPPGSP | 530 |
| RSC-1293 | GTAEAASASGASSRGQNHSPMGLTGPPGSP | 531 |
| RSC-1309 | GTAEAASASGAYSRGPNAGPAGLEGRPGSP | 532 |
| RSC-1326 | GTAEAASASGASERGNNAGPANLTGFPGSP | 533 |
| RSC-1345 | GTAEAASASGASHRGTNPKPAILTGPPGSP | 534 |
| RSC-1354 | GTAEAASASGMSSRRTNANPAQLTGPPGSP | 535 |
| RSC-1426 | GTAEAASASGGAGRTDNHEPLELGAAPGSP | 536 |
| RSC-1478 | GTAEAASASGLAGRSENTAPLELTAGPGSP | 537 |
| RSC-1479 | GTAEAASASGLEGRPDNHEPLALVASPGSP | 538 |
| RSC-1496 | GTAEAASASGLSGRSDNEEPLALPAGPGSP | 539 |
| RSC-1508 | GTAEAASASGEAGRTDNHEPLELSAPPGSP | 540 |
| RSC-1513 | GTAEAASASGEGGRSDNHGPLELVSGPGSP | 541 |
| RSC-1516 | GTAEAASASGLSGRSDNEAPLELEAGPGSP | 542 |
| RSC-1524 | GTAEAASASGLGGRADNHEPPELGAGPGSP | 543 |
| RSC-1622 | GTAEAASASGPPSRGTNAEPAGLTGEPGSP | 544 |
| RSC-1629 | GTAEAASASGASTRGENAGPAGLEAPPGSP | 545 |
| RSC-1664 | GTAEAASASGESSRGTNGAPEGLTGPPGSP | 546 |
| RSC-1667 | GTAEAASASGASSRATNESPAGLTGEPGSP | 547 |
| RSC-1709 | GTAEAASASGASSRGENPPPGGLTGPPGSP | 548 |
| RSC-1712 | GTAEAASASGAASRGTNTGPAELTGSPGSP | 549 |
| RSC-1727 | GTAEAASASGAGSRTTNAGPGGLEGPPGSP | 550 |
| RSC-1754 | GTAEAASASGAPSRGENAGPATLTGAPGSP | 551 |
| RSC-1819 | GTAEAASASGESGRAANTGPPTLTAPPGSP | 552 |
| RSC-1832 | GTAEAASASGNPGRAANEGPPGLPGSPGSP | 553 |
| RSC-1855 | GTAEAASASGESSRAANLTPPELTGPPGSP | 554 |
| RSC-1911 | GTAEAASASGASGRAANETPPGLTGAPGSP | 555 |
| RSC-1929 | GTAEAASASGNSGRGENLGAPGLTGTPGSP | 556 |
| RSC-1951 | GTAEAASASGTTGRAANLTPAGLTGPPGSP | 557 |
| RSC-2295 | GTAEAASASGEAGRSANHTPAGLTGPPGSP | 558 |
| RSC-2298 | GTAEAASASGESGRAANTTPAGLTGPPGSP | 559 |
| RSC-2038 | GTAEAASASGTTGRATEAANLTPAGLTGPPGSP | 560 |
| RSC-2072 | GTAEAASASGTTGRAEEAANLTPAGLTGPPGSP | 561 |
| RSC-2089 | GTAEAASASGTTGRAGEAANLTPAGLTGPPGSP | 562 |
| RSC-2302 | GTAEAASASGTTGRATEAANATPAGLTGPPGSP | 563 |
| RSC-3047 | GTAEAASASGTTGRAGEAEGATSAGATGPPGSP | 564 |
| RSC-3052 | GTAEAASASGTTGEAGEAANATSAGATGPPGSP | 565 |
| RSC-3043 | GTAEAASASGTTGEAGEAAGLTPAGLTGPPGSP | 566 |
| RSC-3041 | GTAEAASASGTTGAAGEAANATPAGLTGPPGSP | 567 |
| RSC-3044 | GTAEAASASGTTGRAGEAAGLTPAGLTGPPGSP | 568 |
| RSC-3057 | GTAEAASASGTTGRAGEAANATSAGATGPPGSP | 569 |
| RSC-3058 | GTAEAASASGTTGEAGEAAGATSAGATGPPGSP | 570 |
| RSC-2485 | GTAEAASASGESGRAANTEPPELGAGPGSP | 571 |
| RSC-2486 | GTAEAASASGESGRAANTAPEGLTGPPGSP | 572 |
| RSC-2488 | GTAEAASASGEPGRAANHEPSGLTEGPGSP | 573 |
| RSC-2599 | GTAEAASASGESGRAANHTGAPPGGLTGPPGSP | 574 |
| RSC-2706 | GTAEAASASGTTGRTGEGANATPGGLTGPPGSP | 575 |
| RSC-2707 | GTAEAASASGRTGRSGEAANETPEGLEGPPGSP | 576 |
| RSC-2708 | GTAEAASASGRTGRTGESANETPAGLGGPPGSP | 577 |
| RSC-2709 | GTAEAASASGSTGRTGEPANETPAGLSGPPGSP | 578 |
| RSC-2710 | GTAEAASASGTTGRAGEPANATPTGLSGPPGSP | 579 |
| RSC-2711 | GTAEAASASGRTGRPGEGANATPTGLPGPPGSP | 580 |
| RSC-2712 | GTAEAASASGRTGRGGEAANATPSGLGGPPGSP | 581 |
| RSC-2713 | GTAEAASASGSTGRSGESANATPGGLGGPPGSP | 582 |
| RSC-2714 | GTAEAASASGRTGRTGEEANATPAGLPGPPGSP | 583 |
| RSC-2715 | GTAEAASASGATGRPGEPANTTPEGLEGPPGSP | 584 |
| RSC-2716 | GTAEAASASGSTGRSGEPANATPGGLTGPPGSP | 585 |
| RSC-2717 | GTAEAASASGPTGRGGEGANTTPTGLPGPPGSP | 586 |
| RSC-2718 | GTAEAASASGPTGRSGEGANATPSGLTGPPGSP | 587 |
| RSC-2719 | GTAEAASASGTTGRASEGANSTPAPLTEPPGSP | 588 |
| RSC-2720 | GTAEAASASGTYGRAAEAANTTPAGLTAPPGSP | 589 |
| RSC-2721 | GTAEAASASGTTGRATEGANATPAELTEPPGSP | 590 |
| RSC-2722 | GTAEAASASGTVGRASEEANTTPASLTGPPGSP | 591 |
| RSC-2723 | GTAEAASASGTTGRAPEAANATPAPLTGPPGSP | 592 |
| RSC-2724 | GTAEAASASGTWGRATEPANATPAPLTSPPGSP | 593 |
| RSC-2725 | GTAEAASASGTVGRASESANATPAELTSPPGSP | 594 |
| RSC-2726 | GTAEAASASGTVGRAPEGANSTPAGLTGPPGSP | 595 |
| RSC-2727 | GTAEAASASGTWGRATEAPNLEPATLTTPPGSP | 596 |
| RSC-2728 | GTAEAASASGTTGRATEAPNLTPAPLTEPPGSP | 597 |
| RSC-2729 | GTAEAASASGTQGRATEAPNLSPAALTSPPGSP | 598 |
| RSC-2730 | GTAEAASASGTQGRAAEAPNLTPATLTAPPGSP | 599 |
| RSC-2731 | GTAEAASASGTSGRAPEATNLAPAPLTGPPGSP | 600 |
| RSC-2732 | GTAEAASASGTQGRAAEAANLTPAGLTEPPGSP | 601 |
| RSC-2733 | GTAEAASASGTTGRAGSAPNLPPTGLTTPPGSP | 602 |
| RSC-2734 | GTAEAASASGTTGRAGGAENLPPEGLTAPPGSP | 603 |
| RSC-2735 | GTAEAASASGTTSRAGTATNLTPEGLTAPPGSP | 604 |
| RSC-2736 | GTAEAASASGTTGRAGTATNLPPSGLTTPPGSP | 605 |
| RSC-2737 | GTAEAASASGTTARAGEAENLSPSGLTAPPGSP | 606 |
| RSC-2738 | GTAEAASASGTTGRAGGAGNLAPGGLTEPPGSP | 607 |
| RSC-2739 | GTAEAASASGTTGRAGTATNLPPEGLTGPPGSP | 608 |
| RSC-2740 | GTAEAASASGTTGRAGGAANLAPTGLTEPPGSP | 609 |
| RSC-2741 | GTAEAASASGTTGRAGTAENLAPSGLTTPPGSP | 610 |
| RSC-2742 | GTAEAASASGTTGRAGSATNLGPGGLTGPPGSP | 611 |
| RSC-2743 | GTAEAASASGTTARAGGAENLTPAGLTEPPGSP | 612 |
| RSC-2744 | GTAEAASASGTTARAGSAENLSPSGLTGPPGSP | 613 |
| RSC-2745 | GTAEAASASGTTARAGGAGNLAPEGLTTPPGSP | 614 |
| RSC-2746 | GTAEAASASGTTSRAGAAENLTPTGLTGPPGSP | 615 |
| RSC-2747 | GTAEAASASGTYGRTTTPGNEPPASLEAEPGSP | 616 |
| RSC-2748 | GTAEAASASGTYSRGESGPNEPPPGLTGPPGSP | 617 |
| RSC-2749 | GTAEAASASGAWGRTGASENETPAPLGGEPGSP | 618 |
| RSC-2750 | GTAEAASASGRWGRAETTPNTPPEGLETEPGSP | 619 |
| RSC-2751 | GTAEAASASGESGRAANHTGAEPPELGAGPGSP | 620 |
| RSC-2754 | GTAEAASASGTTGRAGEAANLTPAGLTESPGSP | 621 |
| RSC-2755 | GTAEAASASGTTGRAGEAANLTPAALTESPGSP | 622 |
| RSC-2756 | GTAEAASASGTTGRAGEAANLTPAPLTESPGSP | 623 |
| RSC-2757 | GTAEAASASGTTGRAGEAANLTPEPLTESPGSP | 624 |
| RSC-2758 | GTAEAASASGTTGRAGEAANLTPAGLTGAPGSP | 625 |
| RSC-2759 | GTAEAASASGTTGRAGEAANLTPEGLTGAPGSP | 626 |
| RSC-2760 | GTAEAASASGTTGRAGEAANLTPEPLTGAPGSP | 627 |
| RSC-2761 | GTAEAASASGTTGRAGEAANLTPAGLTEAPGSP | 628 |
| RSC-2762 | GTAEAASASGTTGRAGEAANLTPEGLTEAPGSP | 629 |
| RSC-2763 | GTAEAASASGTTGRAGEAANLTPAPLTEAPGSP | 630 |
| RSC-2764 | GTAEAASASGTTGRAGEAANLTPEPLTEAPGSP | 631 |
| RSC-2765 | GTAEAASASGTTGRAGEAANLTPEPLTGPPGSP | 632 |
| RSC-2766 | GTAEAASASGTTGRAGEAANLTPAGLTGGPGSP | 633 |
| RSC-2767 | GTAEAASASGTTGRAGEAANLTPEGLTGGPGSP | 634 |
| RSC-2768 | GTAEAASASGTTGRAGEAANLTPEALTGGPGSP | 635 |
| RSC-2769 | GTAEAASASGTTGRAGEAANLTPEPLTGGPGSP | 636 |
| RSC-2770 | GTAEAASASGTTGRAGEAANLTPAGLTEGPGSP | 637 |
| RSC-2771 | GTAEAASASGTTGRAGEAANLTPEGLTEGPGSP | 638 |
| RSC-2772 | GTAEAASASGTTGRAGEAANLTPAPLTEGPGSP | 639 |
| RSC-2773 | GTAEAASASGTTGRAGEAANLTPEPLTEGPGSP | 640 |
| RSC-3047 | GTAEAASASGTTGRAGEAEGATSAGATGPPGSP | 564 |
| RSC-2783 | GTAEAASASGEAGRSAEATSAGATGPPGSP | 641 |
| RSC-3107 | GTAEAASASGSASGTYSRGESGPGSPPGSP | 642 |
| RSC-3103 | GTAEAASASGSASGEAGRTDTHPGSPPGSP | 643 |
| RSC-3102 | GTAEAASASGSASGEPGRAAEHPGSPPGSP | 644 |
| RSC-3119 | GTAEAASASGSPAGESSRGTTIAGSPPGSP | 645 |
| RSC-3043 | GTAEAASASGTTGEAGEAAGLTPAGLTGPPGSP | 566 |
| RSC-2789 | GTAEAASASGEAGESAGATPAGLTGPPGSP | 646 |
| RSC-3109 | GTAEAASASGSASGAPLELEAGPGSPPGSP | 647 |
| RSC-3110 | GTAEAASASGSASGEPPELGAGPGSPPGSP | 648 |
| RSC-3111 | GTAEAASASGSASGEPSGLTEGPGSPPGSP | 649 |
| RSC-3112 | GTAEAASASGSASGTPAPLTEPPGSPPGSP | 650 |
| RSC-3113 | GTAEAASASGSASGTPAELTEPPGSPPGSP | 651 |
| RSC-3114 | GTAEAASASGSASGPPPGLTGPPGSPPGSP | 652 |
| RSC-3115 | GTAEAASASGSASGTPAPLGGEPGSPPGSP | 653 |
| RSC-3125 | GTAEAASASGSPAGAPEGLTGPAGSPPGSP | 654 |
| RSC-3126 | GTAEAASASGSPAGPPEGLETEAGSPPGSP | 655 |
| RSC-3127 | GTAEAASASGSPTSGQGGLTGPGSEPPGSP | 656 |
| RSC-3131 | GTAEAASASGSESAPPEGLETESTEPPGSP | 657 |
| RSC-3132 | GTAEAASASGSEGSEPLELGAASETPPGSP | 658 |
| RSC-3133 | GTAEAASASGSEGSGPAGLEAPSETPPGSP | 659 |
| RSC-3138 | GTAEAASASGSEPTPPASLEAEPGSPPGSP | 660 |

[0175] In another aspect, the release segments (either RS1 and/or RS2) for incorporation into the polypeptides of any of the subject composition embodiments described herein can be designed to be selectively sensitive in order to have different rates of cleavage and different cleavage efficiencies to the various proteases for which they are substrates. As a given protease may be found in different concentrations in diseased tissues, including but not limited to a tumor, a blood cancer, or an inflammatory tissue or site of inflammation compared to healthy tissues or in the circulation, the disclosure provides RS that have had the individual amino acid sequences engineered to have a higher or lower cleavage efficiency for a given protease in order to ensure that the polypeptide is preferentially converted from the prodrug form to the active form (i.e., by the separation and release of the antigen binding fragments and XTEN from the polypeptide after cleavage of the release segment) when in proximity to the target cell or tissue and its co-localized proteases compared to the rate of cleavage of the release segment in healthy tissue or the circulation such that the released antigen binding fragments have a greater ability to bind to ligands in the diseased tissues compared to the prodrug form that remains in circulation. By such selective designs, the therapeutic index of the resulting compositions can be improved, resulting in reduced side effects relative to convention therapeutics that do not incorporate such site-specific activation.

[0176] As used herein cleavage efficiency is defined as the loge value of the ratio of the percentage of the test substrate comprising the release segment cleaved to the percentage of the control substrate AC1611 cleaved when each is subjected to the protease enzyme in biochemical assays (further detailed in the Examples) in which the reaction is conducted wherein the initial substrate concentration is 6 μM, the reactions are incubated at 37° C. for 2 hours before being stopped by adding EDTA, with the amount of digestion products and uncleaved substrate analyzed by non-reducing SDS-PAGE to establish the ratio of the percentage of the release segments cleaved. The cleavage efficiency is calculated as follows:

$${Log}_{2} ( \frac{\% Cleaved for substrate of interest}{\% cleaved for AC 1611 in the same experiment} )$$

$${Log}_{2} ( \frac{\% Cleaved for substrate of interest}{\% cleaved for AC 1611 in the same experiment} )$$

[0177] Thus, a cleavage efficiency of −1 means that the amount of test substrate cleaved was 50% compared to that of the control substrate, while a cleavage efficiency of +1 means that the amount of test substrate cleaved was 200% compared to that of the control substrate. A higher rate of cleavage by the test protease relative to the control would result in a higher cleavage efficiency, and a slower rate of cleavage by the test protease relative to the control would result in a lower cleavage efficiency. As detailed in the Examples, a control RS sequence AC1611 (RSR-1517), having the amino acid sequence EAGRSANHEPLGLVAT (SEQ ID NO: 42), was established as having an appropriate baseline cleavage efficiency by the proteases legumain, MMP-2, MMP-7, MMP-9, MMP-14, uPA, and matriptase, when tested in in vitro biochemical assays for rates of cleavage by the individual proteases. By selective substitution of amino acids at individual locations in the RS peptides, libraries of RS were created and evaluated against the panel of the 7 proteases (detailed more fully in the Examples), resulting in profiles that were used to establish guidelines for appropriate amino acid substitutions in order to achieve RS with desired cleavage efficiencies. In making RS with desired cleavage efficiencies, substitutions using the hydrophilic amino acids A, E, G, P, S, and T are preferred, however other L-amino acids can be substituted at given positions in order to adjust the cleavage efficiency so long as the release segment retains at least some susceptibility to cleavage by a protease.

### IV). XTEN Polypeptides

[0178] In another aspect, the disclosure relates to polypeptides comprising at least a first extended recombinant polypeptide (XTEN) that is incorporated into the subject composition embodiments described herein, thereby increasing the mass and size of the construct and also serving to greatly reduce the ability of the antigen binding fragments to bind their ligands when the molecule is in the intact, uncleaved state, as described more fully below. In some embodiments, the disclosure provides a polypeptide comprising a single XTEN fused to the terminus of the RS that is located between the antigen binding fragment and the XTEN. In other embodiments, the disclosure provides a polypeptide comprising a first and a second XTEN (XTEN1 and XTEN2) fused to the N- and C-terminus of an RS1 and RS2, respectively, that are located between each antigen binding fragment and the XTEN.

[0179] Without being bound by theory, the incorporation of the XTEN can be incorporated into the design of the subject compositions to confer certain properties: 1) provide polypeptide compositions with an XTEN that shields the antigen binding fragments and reduces their binding affinity for the target cell markers and effector cell antigens when the composition is in its intact, prodrug form; ii) provide polypeptide compositions with an XTEN that provides enhanced half-life when administered to a subject, iii) contribute to the solubility and stability of the intact composition, thereby enhancing the pharmaceutical properties of the subject compositions; and iv) provide polypeptide compositions with an XTEN that reduces extravasation in normal tissues and organs yet permits a degree of extravasation in diseased tissues (e.g., a tumor) with larger pore sizes in the vasculature, yet could be released from the composition by action of certain mammalian proteases, thereby permitting the antigen binding fragments of the composition to more readily penetrate into the diseased tissues, e.g. a tumor, and to bind to and link together the target cell markers on the effector cell and tumor cell. To meet these needs, the disclosure provides compositions comprising one or more XTEN in which the XTEN provides increased mass and hydrodynamic radius to the resulting composition. The XTEN polypeptides of the embodiments provide certain advantages in the design of the subject compositions in that is provides not only provides increased mass and hydrodynamic radius to the composition, but its flexible, unstructured characteristics can provide a shielding effect over the antigen binding fragments of the composition, thereby reducing the binding to antigens in normal tissues or the vasculature of normal tissues that don't express or express reduced levels of target cell markers and/or effector cell antigens. Additionally, the incorporation of XTEN into the subject compositions can enhance the solubility and proper folding of the single chain antibody binding fragments during their expression and recovery.

[0180] XTEN are polypeptides with non-naturally occurring, substantially non-repetitive sequences having a low degree or no secondary or tertiary structure under physiologic conditions, as well as one or more additional properties described in the paragraphs that follow. In some embodiments, the present disclosure provides polypeptides comprising one or more XTEN having from at least about 36, 72, 96, 100, 144, 200, 288, 292, 293, 300, 576, 584, 800, 864, 867, 868, 900, or at least about 1000 or more amino acids. In one embodiment, the present disclosure provides a polypeptide comprising an XTEN1 wherein the XTEN1 is characterized in that it has at least about 36 or 100 amino acid residues wherein at least 90%, 91%, 92%, 93%, 94%, 95%, 96%, 97%, 98%, 99% or 100% of the amino acid residues of the XTEN1 sequence are selected from glycine (G), alanine (A), serine (S), threonine (T), glutamate (E) and proline (P) and it has at least 4-6 different amino acids selected from G, A, S, T, E and P. In some embodiments, the present disclosure provides polypeptides comprising an XTEN1 having at least about 36 to about 1000, at least about 100 to 1000, or at least 100 to about 900, or at least about 144 to about 868, or at least about 288-868 amino acid residues. In other cases, the present disclosure provides polypeptides comprising an XTEN1 having at least about 36 to about 1000, at least about 100 to about 1000, or at least 100 to about 900, or at least about 144 to about 868, or at least about 288-868 amino acid residues wherein 90%, 91%, 92%, 93%, 94%, 95%, 96%, 97%, 98%, 99%, or 100% of the amino acid residues are selected from 4-6 types of amino acids selected from the group consisting of glycine (G), alanine (A), serine (S), threonine (T), glutamate (E) and proline (P). In other cases, the present disclosure provides polypeptides comprising an XTEN1 wherein the XTEN1 is characterized in that it has at least about 36 to about 1000 amino acid residues or at least about 100 to about 1000 amino acid residues, at least 90%, 91%, 92%, 93%, 94%, 95%, 96%, 97%, 98%, 99% or 100% of the amino acid residues of the XTEN1 sequence are selected from six types of amino acids selected from glycine (G), alanine (A), serine (S), threonine (T), glutamate (E) and proline (P).

[0181] In another embodiment, the present disclosure provides polypeptides of any of the embodiments described herein comprising an XTEN1 wherein the XTEN1 is characterized in that it has at least about 36 to about 1000, at least about 100 to about 1000, or at least about 100 to about 900, or at least 144 to about 868 amino acid residues, wherein at least 90%, 91%, 92%, 93%, 94%, 95%, 96%, 97%, 98%, 99% or 100% of the amino acid residues of the XTEN1 sequence are selected from at least three of the sequences of SEQ ID NOs: 661-664. In some cases, the XTEN 1 sequence can be assembled by any combination of the 12 amino acid units of SEQ ID NOs: 661-664 such that any length of at least 36 amino acids or longer, in 12 amino acid increments, can be achieved; e.g., 36, 48, 60, 72, 84, 96 amino acids, etc. In other cases, the polypeptides of any of the subject composition embodiments described herein can comprise an XTEN1 wherein the XTEN1 is characterized in that it has at least about 36 to about 1000, at least about 100 to about 1000, or at least about 100 to about 900, or at least 144 to about 868 amino acid residues, wherein at least 90%, 91%, 92%, 93%, 94%, 95%, 96%, 97%, 98%, 99% or 100% of the amino acid residues of the XTEN1 sequence are selected from the sequences of SEQ ID NOs: 665-718 and 922-926. In another embodiment, the XTEN of any of the subject composition embodiments described herein can have an affinity tag of HHHHHH (SEQ ID NO: 1150), HHHHHHHH (SEQ ID NO: 1151), or the sequence EPEA (SEQ ID NO: 1149) appended to the N- or C-terminus of the XTEN of the composition to facilitate the purification of the composition to at least 90%, 91%, 92%, 93%, 94%, 95%, 96%, 97%, 98%, or at least 99% purity by chromatography methods known in the art; e.g., IMAC chromatography or C-tagXL chromatography, or methods described in the Examples, below.

[0182] In another embodiment, the present disclosure provides a polypeptide comprising an XTEN1 wherein the XTEN1 comprises an amino acid sequence having at least about 90%, 91%, 92%, 93%, 94%, 95%, 96%, 97%, 98%, 99%, or 100% sequence identity to an AE36 (comprising a sequence selected from any three of the sequences of SEQ ID NOs: 661-664), or a sequence selected from the sequences of AE144_1A, AE144_2A, AE144_2B, AE144_3A, AE144_3B, AE144_4A, AE144_4B, AE144_5A, AE144_6B, AE144_7A, AE284, AE288_1, AE288_2, AE288_3, AE292, AE293, AE576, AE584, AE864, AE864_2, AE865, AE866, AE867, and AE868, each of which being set forth in Table 7.

[0183] In some aspects of any of the embodiments disclosed herein, a subject polypeptide comprises an XTEN1 and an XTEN2. The configurations of the polypeptides comprising XTEN1 and XTEN2, amongst the other components, are described herein, below. In one embodiment, the present disclosure provides a polypeptide comprising an XTEN1 and an XTEN2 wherein the XTEN 1 and XTEN2 are each characterized in that it has at least about 36 to about 1000 amino acid residues or at least about 100 to about 1000 amino acid residues, wherein at least 90%, 91%, 92%, 93%, 94%, 95%, 96%, 97%, 98%, 99% or 100% of the amino acid residues of the XTEN 1 and XTEN2 sequences are selected from at least three of the sequences of SEQ ID NOs: 661-664. In another embodiment, the present disclosure provides a polypeptide comprising an XTEN1 and an XTEN2 wherein the XTEN 1 and the XTEN2 are each characterized in that each has at least about 36 to about 1000 amino acid residues or at least about 100 to about 1000 amino acid residues, wherein at least 90%, 91%, 92%, 93%, 94%, 95%, 96%, 97%, 98%, 99% or 100% of the amino acid residues of the XTEN 1 and XTEN2 sequences are selected from the sequences of SEQ ID NOs: 665-718 and 922-926. In another embodiment, the polypeptides of any of the subject composition embodiments described herein can comprise an XTEN1 and an XTEN2 wherein the XTEN 1 and XTEN2 each comprises an amino acid sequence having at least about 90%, 91%, 92%, 93%, 94%, 95%, 96%, 97%, 98%, 99%, or 100% sequence identity to a sequence selected from the sequences of AE144_1A, AE144_2A, AE144_2B, AE144_3A, AE144_3B, AE144_4A, AE144_4B, AE144_5A, AE144_6B, AE144_7A, AE284, AE288_1, AE288_2, AE288_3, AE292, AE293, AE576, AE584, AE864, AE864_2, AE865, AE866, AE867, and AE868, each of which being set forth in Table 7. In some cases of the foregoing embodiments of the paragraph, the XTEN1 and XTEN 2 are identical. In other cases of the foregoing embodiments of the paragraph, the XTEN1 and XTEN2 of the foregoing embodiments of the paragraph have different amino acid sequences. In some cases, the XTEN1 of any of the polypeptide composition embodiments having 2 XTENs is fused to the C-terminus of the polypeptide and is selected from the group consisting of AE293, AE300, AE584 and AE868. In other cases, the XTEN2 of any of the polypeptide composition embodiments having 2 XTENs is fused to the N-terminus of the polypeptide and is selected from the group consisting of AE144_7A, AE292, AE576, and AE864. In other cases, the XTEN1 of any of the polypeptide composition embodiments having 2 XTENs is fused to the C-terminus of the polypeptide and is selected from the group consisting of AE293, AE300, AE584 and AE868 and the XTEN 2 is fused to the N-terminus and is selected from the group consisting of AE144_7A, AE292, AE576, and AE864.

TABLE 6
XTEN Sequence Motifs

| Motif Name | Amino Acid Sequence | SEQ ID NO: |
|---|---|---|
| AE1 | GSPAGSPTSTEE | 661 |
| AE2 | GSEPATSGSETP | 662 |
| AE3 | GTSESATPESGP | 663 |
| AE4 | GTSTEPSEGSAP | 664 |

TABLE 7
XTEN Sequences

| | | SEQ |
|---|---|---|
| XTEN | | ID |
| Name | Amino Acid Sequence | NO: |
| AE144 | GSEPATSGSETPGTSESATPESGPGSEPATSGSETPGSPAGSPTSTEEGTSTE | 665 |
| | PSEGSAPGSEPATSGSETPGSEPATSGSETPGSEPATSGSETPGTSTEPSEGS | |
| | APGTSESATPESGPGSEPATSGSETPGTSTEPSEGSAP | |
| AE144_1A | SPAGSPTSTEEGTSESATPESGPGTSTEPSEGSAPGSPAGSPTSTEEGTSTEP | 666 |
| | SEGSAPGTSTEPSEGSAPGTSESATPESGPGSEPATSGSETPGSEPATSGSET | |
| | PGSPAGSPTSTEEGTSESATPESGPGTSTEPSEGSAPG | |
| AE144_2A | TSTEPSEGSAPGSPAGSPTSTEEGTSTEPSEGSAPGTSTEPSEGSAPGTSESA | 667 |
| | TPESGPGTSTEPSEGSAPGTSESATPESGPGSEPATSGSETPGTSTEPSEGSA | |
| | PGTSTEPSEGSAPGTSESATPESGPGTSESATPESGPG | |
| AE144_2B | TSTEPSEGSAPGSPAGSPTSTEEGTSTEPSEGSAPGTSTEPSEGSAPGTSESA | 668 |
| | TPESGPGTSTEPSEGSAPGTSESATPESGPGSEPATSGSETPGTSTEPSEGSA | |
| | PGTSTEPSEGSAPGTSESATPESGPGTSESATPESGPG | |
| AE144_3A | SPAGSPTSTEEGTSESATPESGPGSEPATSGSETPGTSESATPESGPGTSTEP | 669 |
| | SEGSAPGTSTEPSEGSAPGTSTEPSEGSAPGTSTEPSEGSAPGTSTEPSEGSA | |
| | PGTSTEPSEGSAPGSPAGSPTSTEEGTSTEPSEGSAPG | |
| AE144_3B | SPAGSPTSTEEGTSESATPESGPGSEPATSGSETPGTSESATPESGPGTSTEP | 670 |
| | SEGSAPGTSTEPSEGSAPGTSTEPSEGSAPGTSTEPSEGSAPGTSTEPSEGSA | |
| | PGTSTEPSEGSAPGSPAGSPTSTEEGTSTEPSEGSAPG | |
| AE144_4A | TSESATPESGPGSEPATSGSETPGTSESATPESGPGSEPATSGSETPGTSESA | 671 |
| | TPESGPGTSTEPSEGSAPGTSESATPESGPGSPAGSPTSTEEGSPAGSPTSTE | |
| | EGSPAGSPTSTEEGTSESATPESGPGTSTEPSEGSAPG | |
| AE144_4B | TSESATPESGPGSEPATSGSETPGTSESATPESGPGSEPATSGSETPGTSESA | 672 |
| | TPESGPGTSTEPSEGSAPGTSESATPESGPGSPAGSPTSTEEGSPAGSPTSTE | |
| | EGSPAGSPTSTEEGTSESATPESGPGTSTEPSEGSAPG | |
| AE144_5A | TSESATPESGPGSEPATSGSETPGTSESATPESGPGSEPATSGSETPGTSESA | 673 |
| | TPESGPGTSTEPSEGSAPGSPAGSPTSTEEGTSESATPESGPGSEPATSGSET | |
| | PGTSESATPESGPGSPAGSPTSTEEGSPAGSPTSTEEG | |
| AE144_6B | TSTEPSEGSAPGTSESATPESGPGTSESATPESGPGTSESATPESGPGSEPAT | 674 |
| | SGSETPGSEPATSGSETPGSPAGSPTSTEEGTSTEPSEGSAPGTSTEPSEGSA | |
| | PGSEPATSGSETPGTSESATPESGPGTSTEPSEGSAPG | |
| AE2881 | GTSESATPESGPGSEPATSGSETPGTSESATPESGPGSEPATSGSETPGTSES | 675 |
| | ATPESGPGTSTEPSEGSAPGSPAGSPTSTEEGTSESATPESGPGSEPATSGSE | |
| | TPGTSESATPESGPGSPAGSPTSTEEGSPAGSPTSTEEGTSTEPSEGSAPGTS | |
| | ESATPESGPGTSESATPESGPGTSESATPESGPGSEPATSGSETPGSEPATSG | |
| | SETPGSPAGSPTSTEEGTSTEPSEGSAPGTSTEPSEGSAPGSEPATSGSETPG | |
| | TSESATPESGPGTSTEPSEGSAP | |
| AE288_2 | GSPAGSPTSTEEGTSESATPESGPGSEPATSGSETPGTSESATPESGPGTSTE | 676 |
| | PSEGSAPGTSTEPSEGSAPGTSTEPSEGSAPGTSTEPSEGSAPGTSTEPSEGS | |
| | APGTSTEPSEGSAPGSPAGSPTSTEEGTSTEPSEGSAPGTSESATPESGPGSE | |
| | PATSGSETPGTSESATPESGPGSEPATSGSETPGTSESATPESGPGTSTEPSE | |
| | GSAPGTSESATPESGPGSPAGSPTSTEEGSPAGSPTSTEEGSPAGSPTSTEEG | |
| | TSESATPESGPGTSTEPSEGSAP | |
| AE576 | GSPAGSPTSTEEGTSESATPESGPGTSTEPSEGSAPGSPAGSPTSTEEGTSTE | 677 |
| | PSEGSAPGTSTEPSEGSAPGTSESATPESGPGSEPATSGSETPGSEPATSGSE | |
| | TPGSPAGSPTSTEEGTSESATPESGPGTSTEPSEGSAPGTSTEPSEGSAPGSP | |
| | AGSPTSTEEGTSTEPSEGSAPGTSTEPSEGSAPGTSESATPESGPGTSTEPSE | |
| | GSAPGTSESATPESGPGSEPATSGSETPGTSTEPSEGSAPGTSTEPSEGSAPG | |
| | TSESATPESGPGTSESATPESGPGSPAGSPTSTEEGTSESATPESGPGSEPAT | |
| | SGSETPGTSESATPESGPGTSTEPSEGSAPGTSTEPSEGSAPGTSTEPSEGSA | |
| | PGTSTEPSEGSAPGTSTEPSEGSAPGTSTEPSEGSAPGSPAGSPTSTEEGTST | |
| | EPSEGSAPGTSESATPESGPGSEPATSGSETPGTSESATPESGPGSEPATSGS | |
| | ETPGTSESATPESGPGTSTEPSEGSAPGTSESATPESGPGSPAGSPTSTEEGS | |
| | PAGSPTSTEEGSPAGSPTSTEEGTSESATPESGPGTSTEPSEGSAP | |
| AE624 | MAEPAGSPTSTEEGTPGSGTASSSPGSSTPSGATGSPGASPGTSSTGSPGSPA | 678 |
| | GSPTSTEEGTSESATPESGPGTSTEPSEGSAPGSPAGSPTSTEEGTSTEPSEG | |
| | SAPGTSTEPSEGSAPGTSESATPESGPGSEPATSGSETPGSEPATSGSETPGS | |
| | PAGSPTSTEEGTSESATPESGPGTSTEPSEGSAPGTSTEPSEGSAPGSPAGSP | |
| | TSTEEGTSTEPSEGSAPGTSTEPSEGSAPGTSESATPESGPGTSTEPSEGSAP | |
| | GTSESATPESGPGSEPATSGSETPGTSTEPSEGSAPGTSTEPSEGSAPGTSES | |
| | ATPESGPGTSESATPESGPGSPAGSPTSTEEGTSESATPESGPGSEPATSGSE | |
| | TPGTSESATPESGPGTSTEPSEGSAPGTSTEPSEGSAPGTSTEPSEGSAPGTS | |
| | TEPSEGSAPGTSTEPSEGSAPGTSTEPSEGSAPGSPAGSPTSTEEGTSTEPSE | |
| | GSAPGTSESATPESGPGSEPATSGSETPGTSESATPESGPGSEPATSGSETPG | |
| | TSESATPESGPGTSTEPSEGSAPGTSESATPESGPGSPAGSPTSTEEGSPAGS | |
| | PTSTEEGSPAGSPTSTEEGTSESATPESGPGTSTEPSEGSAP | |
| AE864 | GSPAGSPTSTEEGTSESATPESGPGTSTEPSEGSAPGSPAGSPTSTEEGTSTE | 679 |
| | PSEGSAPGTSTEPSEGSAPGTSESATPESGPGSEPATSGSETPGSEPATSGSE | |
| | TPGSPAGSPTSTEEGTSESATPESGPGTSTEPSEGSAPGTSTEPSEGSAPGSP | |
| | AGSPTSTEEGTSTEPSEGSAPGTSTEPSEGSAPGTSESATPESGPGTSTEPSE | |
| | GSAPGTSESATPESGPGSEPATSGSETPGTSTEPSEGSAPGTSTEPSEGSAPG | |
| | TSESATPESGPGTSESATPESGPGSPAGSPTSTEEGTSESATPESGPGSEPAT | |
| | SGSETPGTSESATPESGPGTSTEPSEGSAPGTSTEPSEGSAPGTSTEPSEGSA | |
| | PGTSTEPSEGSAPGTSTEPSEGSAPGTSTEPSEGSAPGSPAGSPTSTEEGTST | |
| | EPSEGSAPGTSESATPESGPGSEPATSGSETPGTSESATPESGPGSEPATSGS | |
| | ETPGTSESATPESGPGTSTEPSEGSAPGTSESATPESGPGSPAGSPTSTEEGS | |
| | PAGSPTSTEEGSPAGSPTSTEEGTSESATPESGPGTSTEPSEGSAPGTSESAT | |
| | PESGPGSEPATSGSETPGTSESATPESGPGSEPATSGSETPGTSESATPESGP | |
| | GTSTEPSEGSAPGSPAGSPTSTEEGTSESATPESGPGSEPATSGSETPGTSES | |
| | ATPESGPGSPAGSPTSTEEGSPAGSPTSTEEGTSTEPSEGSAPGTSESATPES | |
| | GPGTSESATPESGPGTSESATPESGPGSEPATSGSETPGSEPATSGSETPGSP | |
| | AGSPTSTEEGTSTEPSEGSAPGTSTEPSEGSAPGSEPATSGSETPGTSESATP | |
| | ESGPGTSTEPSEGSAP | |
| AE865 | GGSPAGSPTSTEEGTSESATPESGPGTSTEPSEGSAPGSPAGSPTSTEEGTST | 680 |
| | EPSEGSAPGTSTEPSEGSAPGTSESATPESGPGSEPATSGSETPGSEPATSGS | |
| | ETPGSPAGSPTSTEEGTSESATPESGPGTSTEPSEGSAPGTSTEPSEGSAPGS | |
| | PAGSPTSTEEGTSTEPSEGSAPGTSTEPSEGSAPGTSESATPESGPGTSTEPS | |
| | EGSAPGTSESATPESGPGSEPATSGSETPGTSTEPSEGSAPGTSTEPSEGSAP | |
| | GTSESATPESGPGTSESATPESGPGSPAGSPTSTEEGTSESATPESGPGSEPA | |
| | TSGSETPGTSESATPESGPGTSTEPSEGSAPGTSTEPSEGSAPGTSTEPSEGS | |
| | APGTSTEPSEGSAPGTSTEPSEGSAPGTSTEPSEGSAPGSPAGSPTSTEEGTS | |
| | TEPSEGSAPGTSESATPESGPGSEPATSGSETPGTSESATPESGPGSEPATSG | |
| | SETPGTSESATPESGPGTSTEPSEGSAPGTSESATPESGPGSPAGSPTSTEEG | |
| | SPAGSPTSTEEGSPAGSPTSTEEGTSESATPESGPGTSTEPSEGSAPGTSESA | |
| | TPESGPGSEPATSGSETPGTSESATPESGPGSEPATSGSETPGTSESATPESG | |
| | PGTSTEPSEGSAPGSPAGSPTSTEEGTSESATPESGPGSEPATSGSETPGTSE | |
| | SATPESGPGSPAGSPTSTEEGSPAGSPTSTEEGTSTEPSEGSAPGTSESATPE | |
| | SGPGTSESATPESGPGTSESATPESGPGSEPATSGSETPGSEPATSGSETPGS | |
| | PAGSPTSTEEGTSTEPSEGSAPGTSTEPSEGSAPGSEPATSGSETPGTSESAT | |
| | PESGPGTSTEPSEGSAP | |
| AE866 | PGSPAGSPTSTEEGTSESATPESGPGTSTEPSEGSAPGSPAGSPTSTEEGTST | 681 |
| | EPSEGSAPGTSTEPSEGSAPGTSESATPESGPGSEPATSGSETPGSEPATSGS | |
| | ETPGSPAGSPTSTEEGTSESATPESGPGTSTEPSEGSAPGTSTEPSEGSAPGS | |
| | PAGSPTSTEEGTSTEPSEGSAPGTSTEPSEGSAPGTSESATPESGPGTSTEPS | |
| | EGSAPGTSESATPESGPGSEPATSGSETPGTSTEPSEGSAPGTSTEPSEGSAP | |
| | GTSESATPESGPGTSESATPESGPGSPAGSPTSTEEGTSESATPESGPGSEPA | |
| | TSGSETPGTSESATPESGPGTSTEPSEGSAPGTSTEPSEGSAPGTSTEPSEGS | |
| | APGTSTEPSEGSAPGTSTEPSEGSAPGTSTEPSEGSAPGSPAGSPTSTEEGTS | |
| | TEPSEGSAPGTSESATPESGPGSEPATSGSETPGTSESATPESGPGSEPATSG | |
| | SETPGTSESATPESGPGTSTEPSEGSAPGTSESATPESGPGSPAGSPTSTEEG | |
| | SPAGSPTSTEEGSPAGSPTSTEEGTSESATPESGPGTSTEPSEGSAPGTSESA | |
| | TPESGPGSEPATSGSETPGTSESATPESGPGSEPATSGSETPGTSESATPESG | |
| | PGTSTEPSEGSAPGSPAGSPTSTEEGTSESATPESGPGSEPATSGSETPGTSE | |
| | SATPESGPGSPAGSPTSTEEGSPAGSPTSTEEGTSTEPSEGSAPGTSESATPE | |
| | SGPGTSESATPESGPGTSESATPESGPGSEPATSGSETPGSEPATSGSETPGS | |
| | PAGSPTSTEEGTSTEPSEGSAPGTSTEPSEGSAPGSEPATSGSETPGTSESAT | |
| | PESGPGTSTEPSEGSAPG | |
| AE1152 | GSPAGSPTSTEEGTSESATPESGPGTSTEPSEGSAPGSPAGSPTSTEEGTSTE | 682 |
| | PSEGSAPGTSTEPSEGSAPGTSESATPESGPGSEPATSGSETPGSEPATSGSE | |
| | TPGSPAGSPTSTEEGTSESATPESGPGTSTEPSEGSAPGTSTEPSEGSAPGSP | |
| | AGSPTSTEEGTSTEPSEGSAPGTSTEPSEGSAPGTSESATPESGPGTSTEPSE | |
| | GSAPGTSESATPESGPGSEPATSGSETPGTSTEPSEGSAPGTSTEPSEGSAPG | |
| | TSESATPESGPGTSESATPESGPGSPAGSPTSTEEGTSESATPESGPGSEPAT | |
| | SGSETPGTSESATPESGPGTSTEPSEGSAPGTSTEPSEGSAPGTSTEPSEGSA | |
| | PGTSTEPSEGSAPGTSTEPSEGSAPGTSTEPSEGSAPGSPAGSPTSTEEGTST | |
| | EPSEGSAPGTSESATPESGPGSEPATSGSETPGTSESATPESGPGSEPATSGS | |
| | ETPGTSESATPESGPGTSTEPSEGSAPGTSESATPESGPGSPAGSPTSTEEGS | |
| | PAGSPTSTEEGSPAGSPTSTEEGTSESATPESGPGTSTEPSEGSAPGTSESAT | |
| | PESGPGSEPATSGSETPGTSESATPESGPGSEPATSGSETPGTSESATPESGP | |
| | GTSTEPSEGSAPGSPAGSPTSTEEGTSESATPESGPGSEPATSGSETPGTSES | |
| | ATPESGPGSPAGSPTSTEEGSPAGSPTSTEEGTSTEPSEGSAPGTSESATPES | |
| | GPGTSESATPESGPGTSESATPESGPGSEPATSGSETPGSEPATSGSETPGSP | |
| | AGSPTSTEEGTSTEPSEGSAPGTSTEPSEGSAPGSEPATSGSETPGTSESATP | |
| | ESGPGTSTEPSEGSAPGTSESATPESGPGSEPATSGSETPGTSESATPESGPG | |
| | SEPATSGSETPGTSESATPESGPGTSTEPSEGSAPGSPAGSPTSTEEGTSESA | |
| | TPESGPGSEPATSGSETPGTSESATPESGPGSPAGSPTSTEEGSPAGSPTSTE | |
| | EGTSTEPSEGSAPGTSESATPESGPGTSESATPESGPGTSESATPESGPGSEP | |
| | ATSGSETPGSEPATSGSETPGSPAGSPTSTEEGTSTEPSEGSAPGTSTEPSEG | |
| | SAPGSEPATSGSETPGTSESATPESGPGTSTEPSEGSAP | |
| AE144A | STEPSEGSAPGSPAGSPTSTEEGTSTEPSEGSAPGTSESATPESGPGSEPATS | 683 |
| | GSETPGTSESATPESGPGSEPATSGSETPGTSESATPESGPGTSTEPSEGSAP | |
| | GTSESATPESGPGSPAGSPTSTEEGSPAGSPTSTEEGS | |
| AE144B | SEPATSGSETPGTSESATPESGPGSEPATSGSETPGTSESATPESGPGTSTEP | 684 |
| | SEGSAPGSPAGSPTSTEEGTSESATPESGPGSEPATSGSETPGTSESATPESG | |
| | PGSPAGSPTSTEEGSPAGSPTSTEEGTSTEPSEGSAPG | |
| AE180A | TSTEEGTSESATPESGPGSEPATSGSETPGTSESATPESGPGSPAGSPTSTEE | 685 |
| | GSPAGSPTSTEEGTSTEPSEGSAPGTSESATPESGPGTSESATPESGPGTSES | |
| | ATPESGPGSEPATSGSETPGSEPATSGSETPGSPAGSPTSTEEGTSTEPSEGS | |
| | APGTSTEPSEGSAPGSEPATS | |
| AE216A | PESGPGTSTEPSEGSAPGSPAGSPTSTEEGTSESATPESGPGSEPATSGSETP | 686 |
| | GTSESATPESGPGSPAGSPTSTEEGSPAGSPTSTEEGTSTEPSEGSAPGTSES | |
| | ATPESGPGTSESATPESGPGTSESATPESGPGSEPATSGSETPGSEPATSGSE | |
| | TPGSPAGSPTSTEEGTSTEPSEGSAPGTSTEPSEGSAPGSEPATSGSETPGTS | |
| | ESAT | |
| AE252A | ESGPGSEPATSGSETPGTSESATPESGPGTSTEPSEGSAPGSPAGSPTSTEEG | 687 |
| | TSESATPESGPGSEPATSGSETPGTSESATPESGPGSPAGSPTSTEEGSPAGS | |
| | PTSTEEGTSTEPSEGSAPGTSESATPESGPGTSESATPESGPGTSESATPESG | |
| | PGSEPATSGSETPGSEPATSGSETPGSPAGSPTSTEEGTSTEPSEGSAPGTST | |
| | EPSEGSAPGSEPATSGSETPGTSESATPESGPGTSTEPSE | |
| AE288A | TPESGPGTSTEPSEGSAPGTSESATPESGPGSEPATSGSETPGTSESATPESG | 688 |
| | PGSEPATSGSETPGTSESATPESGPGTSTEPSEGSAPGSPAGSPTSTEEGTSE | |
| | SATPESGPGSEPATSGSETPGTSESATPESGPGSPAGSPTSTEEGSPAGSPTS | |
| | TEEGTSTEPSEGSAPGTSESATPESGPGTSESATPESGPGTSESATPESGPGS | |
| | EPATSGSETPGSEPATSGSETPGSPAGSPTSTEEGTSTEPSEGSAPGTSTEPS | |
| | EGSAPGSEPATSGSETPGTSESA | |
| AE324A | PESGPGSPAGSPTSTEEGSPAGSPTSTEEGSPAGSPTSTEEGTSESATPESGP | 689 |
| | GTSTEPSEGSAPGTSESATPESGPGSEPATSGSETPGTSESATPESGPGSEPA | |
| | TSGSETPGTSESATPESGPGTSTEPSEGSAPGSPAGSPTSTEEGTSESATPES | |
| | GPGSEPATSGSETPGTSESATPESGPGSPAGSPTSTEEGSPAGSPTSTEEGTS | |
| | TEPSEGSAPGTSESATPESGPGTSESATPESGPGTSESATPESGPGSEPATSG | |
| | SETPGSEPATSGSETPGSPAGSPTSTEEGTSTEPSEGSAPGTSTEPSEGSAPG | |
| | SEPATS | |
| AE360A | PESGPGTSTEPSEGSAPGTSESATPESGPGSPAGSPTSTEEGSPAGSPTSTEE | 690 |
| | GSPAGSPTSTEEGTSESATPESGPGTSTEPSEGSAPGTSESATPESGPGSEPA | |
| | TSGSETPGTSESATPESGPGSEPATSGSETPGTSESATPESGPGTSTEPSEGS | |
| | APGSPAGSPTSTEEGTSESATPESGPGSEPATSGSETPGTSESATPESGPGSP | |
| | AGSPTSTEEGSPAGSPTSTEEGTSTEPSEGSAPGTSESATPESGPGTSESATP | |
| | ESGPGTSESATPESGPGSEPATSGSETPGSEPATSGSETPGSPAGSPTSTEEG | |
| | TSTEPSEGSAPGTSTEPSEGSAPGSEPATSGSETPGTSESAT | |
| AE396A | PESGPGSEPATSGSETPGTSESATPESGPGTSTEPSEGSAPGTSESATPESGP | 691 |
| | GSPAGSPTSTEEGSPAGSPTSTEEGSPAGSPTSTEEGTSESATPESGPGTSTE | |
| | PSEGSAPGTSESATPESGPGSEPATSGSETPGTSESATPESGPGSEPATSGSE | |
| | TPGTSESATPESGPGTSTEPSEGSAPGSPAGSPTSTEEGTSESATPESGPGSE | |
| | PATSGSETPGTSESATPESGPGSPAGSPTSTEEGSPAGSPTSTEEGTSTEPSE | |
| | GSAPGTSESATPESGPGTSESATPESGPGTSESATPESGPGSEPATSGSETPG | |
| | SEPATSGSETPGSPAGSPTSTEEGTSTEPSEGSAPGTSTEPS | |
| AE432A | EGSAPGSPAGSPTSTEEGTSTEPSEGSAPGTSESATPESGPGSEPATSGSETP | 692 |
| | GTSESATPESGPGSEPATSGSETPGTSESATPESGPGTSTEPSEGSAPGTSES | |
| | ATPESGPGSPAGSPTSTEEGSPAGSPTSTEEGSPAGSPTSTEEGTSESATPES | |
| | GPGTSTEPSEGSAPGTSESATPESGPGSEPATSGSETPGTSESATPESGPGSE | |
| | PATSGSETPGTSESATPESGPGTSTEPSEGSAPGSPAGSPTSTEEGTSESATP | |
| | ESGPGSEPATSGSETPGTSESATPESGPGSPAGSPTSTEEGSPAGSPTSTEEG | |
| | TSTEPSEGSAPGTSESATPESGPGTSESATPESGPGTSESATPESGPGSEPAT | |
| | SGSETPGSEPATSGSETPGSPAGSPTSTEEGTSTEPSEGSAPGTSTEPSEGSA | |
| | PGSEPATS | |
| AE468A | EGSAPGTSTEPSEGSAPGTSTEPSEGSAPGSPAGSPTSTEEGTSTEPSEGSAP | 693 |
| | GTSESATPESGPGSEPATSGSETPGTSESATPESGPGSEPATSGSETPGTSES | |
| | ATPESGPGTSTEPSEGSAPGTSESATPESGPGSPAGSPTSTEEGSPAGSPTST | |
| | EEGSPAGSPTSTEEGTSESATPESGPGTSTEPSEGSAPGTSESATPESGPGSE | |
| | PATSGSETPGTSESATPESGPGSEPATSGSETPGTSESATPESGPGTSTEPSE | |
| | GSAPGSPAGSPTSTEEGTSESATPESGPGSEPATSGSETPGTSESATPESGPG | |
| | SPAGSPTSTEEGSPAGSPTSTEEGTSTEPSEGSAPGTSESATPESGPGTSESA | |
| | TPESGPGTSESATPESGPGSEPATSGSETPGSEPATSGSETPGSPAGSPTSTE | |
| | EGTSTEPSEGSAPGTSTEPSEGSAPGSEPATSGSETPGTSESAT | |
| AE504A | EGSAPGTSTEPSEGSAPGTSTEPSEGSAPGTSTEPSEGSAPGTSTEPSEGSAP | 694 |
| | GSPAGSPTSTEEGTSTEPSEGSAPGTSESATPESGPGSEPATSGSETPGTSES | |
| | ATPESGPGSEPATSGSETPGTSESATPESGPGTSTEPSEGSAPGTSESATPES | |
| | GPGSPAGSPTSTEEGSPAGSPTSTEEGSPAGSPTSTEEGTSESATPESGPGTS | |
| | TEPSEGSAPGTSESATPESGPGSEPATSGSETPGTSESATPESGPGSEPATSG | |
| | SETPGTSESATPESGPGTSTEPSEGSAPGSPAGSPTSTEEGTSESATPESGPG | |
| | SEPATSGSETPGTSESATPESGPGSPAGSPTSTEEGSPAGSPTSTEEGTSTEP | |
| | SEGSAPGTSESATPESGPGTSESATPESGPGTSESATPESGPGSEPATSGSET | |
| | PGSEPATSGSETPGSPAGSPTSTEEGTSTEPSEGSAPGTSTEPSEGSAPGSEP | |
| | ATSGSETPGTSESATPESGPGTSTEPS | |
| AE540A | TPESGPGSPAGSPTSTEEGTSESATPESGPGSEPATSGSETPGTSESATPESG | 695 |
| | PGTSTEPSEGSAPGTSTEPSEGSAPGTSTEPSEGSAPGTSTEPSEGSAPGTST | |
| | EPSEGSAPGTSTEPSEGSAPGSPAGSPTSTEEGTSTEPSEGSAPGTSESATPE | |
| | SGPGSEPATSGSETPGTSESATPESGPGSEPATSGSETPGTSESATPESGPGT | |
| | STEPSEGSAPGTSESATPESGPGSPAGSPTSTEEGSPAGSPTSTEEGSPAGSP | |
| | TSTEEGTSESATPESGPGTSTEPSEGSAPGTSESATPESGPGSEPATSGSETP | |
| | GTSESATPESGPGSEPATSGSETPGTSESATPESGPGTSTEPSEGSAPGSPAG | |
| | SPTSTEEGTSESATPESGPGSEPATSGSETPGTSESATPESGPGSPAGSPTST | |
| | EEGSPAGSPTSTEEGTSTEPSEGSAPGTSESATPESGPGTSESATPESGPGTS | |
| | ESATPESGPGSEPATSGSETPGSEPATSGSETPGSPAGSPTSTEEGTSTEPSE | |
| | GSAPGTSTEP | |
| AE576A | TPESGPGTSESATPESGPGSPAGSPTSTEEGTSESATPESGPGSEPATSGSET | 696 |
| | PGTSESATPESGPGTSTEPSEGSAPGTSTEPSEGSAPGTSTEPSEGSAPGTST | |
| | EPSEGSAPGTSTEPSEGSAPGTSTEPSEGSAPGSPAGSPTSTEEGTSTEPSEG | |
| | SAPGTSESATPESGPGSEPATSGSETPGTSESATPESGPGSEPATSGSETPGT | |
| | SESATPESGPGTSTEPSEGSAPGTSESATPESGPGSPAGSPTSTEEGSPAGSP | |
| | TSTEEGSPAGSPTSTEEGTSESATPESGPGTSTEPSEGSAPGTSESATPESGP | |
| | GSEPATSGSETPGTSESATPESGPGSEPATSGSETPGTSESATPESGPGTSTE | |
| | PSEGSAPGSPAGSPTSTEEGTSESATPESGPGSEPATSGSETPGTSESATPES | |
| | GPGSPAGSPTSTEEGSPAGSPTSTEEGTSTEPSEGSAPGTSESATPESGPGTS | |
| | ESATPESGPGTSESATPESGPGSEPATSGSETPGSEPATSGSETPGSPAGSPT | |
| | STEEGTSTEPSEGSAPGTSTEPSEGSAPGSEPATSGSETPGTSESA | |
| AE612A | GSETPGTSTEPSEGSAPGTSTEPSEGSAPGTSESATPESGPGTSESATPESGP | 697 |
| | GSPAGSPTSTEEGTSESATPESGPGSEPATSGSETPGTSESATPESGPGTSTE | |
| | PSEGSAPGTSTEPSEGSAPGTSTEPSEGSAPGTSTEPSEGSAPGTSTEPSEGS | |
| | APGTSTEPSEGSAPGSPAGSPTSTEEGTSTEPSEGSAPGTSESATPESGPGSE | |
| | PATSGSETPGTSESATPESGPGSEPATSGSETPGTSESATPESGPGTSTEPSE | |
| | GSAPGTSESATPESGPGSPAGSPTSTEEGSPAGSPTSTEEGSPAGSPTSTEEG | |
| | TSESATPESGPGTSTEPSEGSAPGTSESATPESGPGSEPATSGSETPGTSESA | |
| | TPESGPGSEPATSGSETPGTSESATPESGPGTSTEPSEGSAPGSPAGSPTSTE | |
| | EGTSESATPESGPGSEPATSGSETPGTSESATPESGPGSPAGSPTSTEEGSPA | |
| | GSPTSTEEGTSTEPSEGSAPGTSESATPESGPGTSESATPESGPGTSESATPE | |
| | SGPGSEPATSGSETPGSEPATSGSETPGSPAGSPTSTEEGTSTEPSEGSAPGT | |
| | STEPSEGSAPGSEPATSGSETPGTSESAT | |
| AE648A | PESGPGTSTEPSEGSAPGTSESATPESGPGSEPATSGSETPGTSTEPSEGSAP | 698 |
| | GTSTEPSEGSAPGTSESATPESGPGTSESATPESGPGSPAGSPTSTEEGTSES | |
| | ATPESGPGSEPATSGSETPGTSESATPESGPGTSTEPSEGSAPGTSTEPSEGS | |
| | APGTSTEPSEGSAPGTSTEPSEGSAPGTSTEPSEGSAPGTSTEPSEGSAPGSP | |
| | AGSPTSTEEGTSTEPSEGSAPGTSESATPESGPGSEPATSGSETPGTSESATP | |
| | ESGPGSEPATSGSETPGTSESATPESGPGTSTEPSEGSAPGTSESATPESGPG | |
| | SPAGSPTSTEEGSPAGSPTSTEEGSPAGSPTSTEEGTSESATPESGPGTSTEP | |
| | SEGSAPGTSESATPESGPGSEPATSGSETPGTSESATPESGPGSEPATSGSET | |
| | PGTSESATPESGPGTSTEPSEGSAPGSPAGSPTSTEEGTSESATPESGPGSEP | |
| | ATSGSETPGTSESATPESGPGSPAGSPTSTEEGSPAGSPTSTEEGTSTEPSEG | |
| | SAPGTSESATPESGPGTSESATPESGPGTSESATPESGPGSEPATSGSETPGS | |
| | EPATSGSETPGSPAGSPTSTEEGTSTEPSEGSAPGTSTEPSEGSAPGSEPATS | |
| | GSETPGTSESAT | |
| AE684A | EGSAPGSPAGSPTSTEEGTSTEPSEGSAPGTSTEPSEGSAPGTSESATPESGP | 699 |
| | GTSTEPSEGSAPGTSESATPESGPGSEPATSGSETPGTSTEPSEGSAPGTSTE | |
| | PSEGSAPGTSESATPESGPGTSESATPESGPGSPAGSPTSTEEGTSESATPES | |
| | GPGSEPATSGSETPGTSESATPESGPGTSTEPSEGSAPGTSTEPSEGSAPGTS | |
| | TEPSEGSAPGTSTEPSEGSAPGTSTEPSEGSAPGTSTEPSEGSAPGSPAGSPT | |
| | STEEGTSTEPSEGSAPGTSESATPESGPGSEPATSGSETPGTSESATPESGPG | |
| | SEPATSGSETPGTSESATPESGPGTSTEPSEGSAPGTSESATPESGPGSPAGS | |
| | PTSTEEGSPAGSPTSTEEGSPAGSPTSTEEGTSESATPESGPGTSTEPSEGSA | |
| | PGTSESATPESGPGSEPATSGSETPGTSESATPESGPGSEPATSGSETPGTSE | |
| | SATPESGPGTSTEPSEGSAPGSPAGSPTSTEEGTSESATPESGPGSEPATSGS | |
| | ETPGTSESATPESGPGSPAGSPTSTEEGSPAGSPTSTEEGTSTEPSEGSAPGT | |
| | SESATPESGPGTSESATPESGPGTSESATPESGPGSEPATSGSETPGSEPATS | |
| | GSETPGSPAGSPTSTEEGTSTEPSEGSAPGTSTEPSEGSAPGSEPATS | |
| AE720A | TSGSETPGSEPATSGSETPGSPAGSPTSTEEGTSESATPESGPGTSTEPSEGS | 700 |
| | APGTSTEPSEGSAPGSPAGSPTSTEEGTSTEPSEGSAPGTSTEPSEGSAPGTS | |
| | ESATPESGPGTSTEPSEGSAPGTSESATPESGPGSEPATSGSETPGTSTEPSE | |
| | GSAPGTSTEPSEGSAPGTSESATPESGPGTSESATPESGPGSPAGSPTSTEEG | |
| | TSESATPESGPGSEPATSGSETPGTSESATPESGPGTSTEPSEGSAPGTSTEP | |
| | SEGSAPGTSTEPSEGSAPGTSTEPSEGSAPGTSTEPSEGSAPGTSTEPSEGSA | |
| | PGSPAGSPTSTEEGTSTEPSEGSAPGTSESATPESGPGSEPATSGSETPGTSE | |
| | SATPESGPGSEPATSGSETPGTSESATPESGPGTSTEPSEGSAPGTSESATPE | |
| | SGPGSPAGSPTSTEEGSPAGSPTSTEEGSPAGSPTSTEEGTSESATPESGPGT | |
| | STEPSEGSAPGTSESATPESGPGSEPATSGSETPGTSESATPESGPGSEPATS | |
| | GSETPGTSESATPESGPGTSTEPSEGSAPGSPAGSPTSTEEGTSESATPESGP | |
| | GSEPATSGSETPGTSESATPESGPGSPAGSPTSTEEGSPAGSPTSTEEGTSTE | |
| | PSEGSAPGTSESATPESGPGTSESATPESGPGTSESATPESGPGSEPATSGSE | |
| | TPGSEPATSGSETPGSPAGSPTSTEEGTSTE | |
| AE756A | TSGSETPGSEPATSGSETPGSPAGSPTSTEEGTSESATPESGPGTSTEPSEGS | 701 |
| | APGTSTEPSEGSAPGSPAGSPTSTEEGTSTEPSEGSAPGTSTEPSEGSAPGTS | |
| | ESATPESGPGTSTEPSEGSAPGTSESATPESGPGSEPATSGSETPGTSTEPSE | |
| | GSAPGTSTEPSEGSAPGTSESATPESGPGTSESATPESGPGSPAGSPTSTEEG | |
| | TSESATPESGPGSEPATSGSETPGTSESATPESGPGTSTEPSEGSAPGTSTEP | |
| | SEGSAPGTSTEPSEGSAPGTSTEPSEGSAPGTSTEPSEGSAPGTSTEPSEGSA | |
| | PGSPAGSPTSTEEGTSTEPSEGSAPGTSESATPESGPGSEPATSGSETPGTSE | |
| | SATPESGPGSEPATSGSETPGTSESATPESGPGTSTEPSEGSAPGTSESATPE | |
| | SGPGSPAGSPTSTEEGSPAGSPTSTEEGSPAGSPTSTEEGTSESATPESGPGT | |
| | STEPSEGSAPGTSESATPESGPGSEPATSGSETPGTSESATPESGPGSEPATS | |
| | GSETPGTSESATPESGPGTSTEPSEGSAPGSPAGSPTSTEEGTSESATPESGP | |
| | GSEPATSGSETPGTSESATPESGPGSPAGSPTSTEEGSPAGSPTSTEEGTSTE | |
| | PSEGSAPGTSESATPESGPGTSESATPESGPGTSESATPESGPGSEPATSGSE | |
| | TPGSEPATSGSETPGSPAGSPTSTEEGTSTEPSEGSAPGTSTEPSEGSAPGSE | |
| | PATSGSETPGTSES | |
| AE792A | EGSAPGTSESATPESGPGSEPATSGSETPGSEPATSGSETPGSPAGSPTSTEE | 702 |
| | GTSESATPESGPGTSTEPSEGSAPGTSTEPSEGSAPGSPAGSPTSTEEGTSTE | |
| | PSEGSAPGTSTEPSEGSAPGTSESATPESGPGTSTEPSEGSAPGTSESATPES | |
| | GPGSEPATSGSETPGTSTEPSEGSAPGTSTEPSEGSAPGTSESATPESGPGTS | |
| | ESATPESGPGSPAGSPTSTEEGTSESATPESGPGSEPATSGSETPGTSESATP | |
| | ESGPGTSTEPSEGSAPGTSTEPSEGSAPGTSTEPSEGSAPGTSTEPSEGSAPG | |
| | TSTEPSEGSAPGTSTEPSEGSAPGSPAGSPTSTEEGTSTEPSEGSAPGTSESA | |
| | TPESGPGSEPATSGSETPGTSESATPESGPGSEPATSGSETPGTSESATPESG | |
| | PGTSTEPSEGSAPGTSESATPESGPGSPAGSPTSTEEGSPAGSPTSTEEGSPA | |
| | GSPTSTEEGTSESATPESGPGTSTEPSEGSAPGTSESATPESGPGSEPATSGS | |
| | ETPGTSESATPESGPGSEPATSGSETPGTSESATPESGPGTSTEPSEGSAPGS | |
| | PAGSPTSTEEGTSESATPESGPGSEPATSGSETPGTSESATPESGPGSPAGSP | |
| | TSTEEGSPAGSPTSTEEGTSTEPSEGSAPGTSESATPESGPGTSESATPESGP | |
| | GTSESATPESGPGSEPATSGSETPGSEPATSGSETPGSPAGSPTSTEEGTSTE | |
| | PSEGSAPGTSTEPSEGSAPGSEPATSGSETPGTSESATPESGPGTSTEPS | |
| AE828A | PESGPGTSTEPSEGSAPGSPAGSPTSTEEGTSTEPSEGSAPGTSTEPSEGSAP | 703 |
| | GTSESATPESGPGSEPATSGSETPGSEPATSGSETPGSPAGSPTSTEEGTSES | |
| | ATPESGPGTSTEPSEGSAPGTSTEPSEGSAPGSPAGSPTSTEEGTSTEPSEGS | |
| | APGTSTEPSEGSAPGTSESATPESGPGTSTEPSEGSAPGTSESATPESGPGSE | |
| | PATSGSETPGTSTEPSEGSAPGTSTEPSEGSAPGTSESATPESGPGTSESATP | |
| | ESGPGSPAGSPTSTEEGTSESATPESGPGSEPATSGSETPGTSESATPESGPG | |
| | TSTEPSEGSAPGTSTEPSEGSAPGTSTEPSEGSAPGTSTEPSEGSAPGTSTEP | |
| | SEGSAPGTSTEPSEGSAPGSPAGSPTSTEEGTSTEPSEGSAPGTSESATPESG | |
| | PGSEPATSGSETPGTSESATPESGPGSEPATSGSETPGTSESATPESGPGTST | |
| | EPSEGSAPGTSESATPESGPGSPAGSPTSTEEGSPAGSPTSTEEGSPAGSPTS | |
| | TEEGTSESATPESGPGTSTEPSEGSAPGTSESATPESGPGSEPATSGSETPGT | |
| | SESATPESGPGSEPATSGSETPGTSESATPESGPGTSTEPSEGSAPGSPAGSP | |
| | TSTEEGTSESATPESGPGSEPATSGSETPGTSESATPESGPGSPAGSPTSTEE | |
| | GSPAGSPTSTEEGTSTEPSEGSAPGTSESATPESGPGTSESATPESGPGTSES | |
| | ATPESGPGSEPATSGSETPGSEPATSGSETPGSPAGSPTSTEEGTSTEPSEGS | |
| | APGTSTEPSEGSAPGSEPATSGSETPGTSESAT | |
| AE869 | GSPGSPAGSPTSTEEGTSESATPESGPGTSTEPSEGSAPGSPAGSPTSTEEGT | 704 |
| | STEPSEGSAPGTSTEPSEGSAPGTSESATPESGPGSEPATSGSETPGSEPATS | |
| | GSETPGSPAGSPTSTEEGTSESATPESGPGTSTEPSEGSAPGTSTEPSEGSAP | |
| | GSPAGSPTSTEEGTSTEPSEGSAPGTSTEPSEGSAPGTSESATPESGPGTSTE | |
| | PSEGSAPGTSESATPESGPGSEPATSGSETPGTSTEPSEGSAPGTSTEPSEGS | |
| | APGTSESATPESGPGTSESATPESGPGSPAGSPTSTEEGTSESATPESGPGSE | |
| | PATSGSETPGTSESATPESGPGTSTEPSEGSAPGTSTEPSEGSAPGTSTEPSE | |
| | GSAPGTSTEPSEGSAPGTSTEPSEGSAPGTSTEPSEGSAPGSPAGSPTSTEEG | |
| | TSTEPSEGSAPGTSESATPESGPGSEPATSGSETPGTSESATPESGPGSEPAT | |
| | SGSETPGTSESATPESGPGTSTEPSEGSAPGTSESATPESGPGSPAGSPTSTE | |
| | EGSPAGSPTSTEEGSPAGSPTSTEEGTSESATPESGPGTSTEPSEGSAPGTSE | |
| | SATPESGPGSEPATSGSETPGTSESATPESGPGSEPATSGSETPGTSESATPE | |
| | SGPGTSTEPSEGSAPGSPAGSPTSTEEGTSESATPESGPGSEPATSGSETPGT | |
| | SESATPESGPGSPAGSPTSTEEGSPAGSPTSTEEGTSTEPSEGSAPGTSESAT | |
| | PESGPGTSESATPESGPGTSESATPESGPGSEPATSGSETPGSEPATSGSETP | |
| | GSPAGSPTSTEEGTSTEPSEGSAPGTSTEPSEGSAPGSEPATSGSETPGTSES | |
| | ATPESGPGTSTEPSEGSAPGR | |
| AE144_R1 | SAGSPGSPAGSPTSTEEGTSESATPESGPGTSTEPSEGSAPGSPAGSPTSTEE | 705 |
| | GTSTEPSEGSAPGTSTEPSEGSAPGTSESATPESGPGSEPATSGSETPGSEPA | |
| | TSGSETPGSPAGSPTSTEEGTSESATPESGPGTESASR | |
| AE288_R1 | SAGSPTGPGSEPATSGSETPGTSESATPESGPGSEPATSGSETPGTSESATPE | 706 |
| | SGPGTSTEPSEGSAPGSPAGSPTSTEEGTSESATPESGPGSEPATSGSETPGT | |
| | SESATPESGPGSPAGSPTSTEEGSPAGSPTSTEEGTSTEPSEGSAPGTSESAT | |
| | PESGPGTSESATPESGPGTSESATPESGPGSEPATSGSETPGSEPATSGSETP | |
| | GSPAGSPTSTEEGTSTEPSEGSAPGTSTEPSEGSAPGSEPATSGSETPGTSES | |
| | ATPESGPGTSTEPSEGSAPSASR | |
| AE432_R1 | SAGSPGSPAGSPTSTEEGTSESATPESGPGTSTEPSEGSAPGSPAGSPTSTEE | 707 |
| | GTSTEPSEGSAPGTSTEPSEGSAPGTSESATPESGPGSEPATSGSETPGSEPA | |
| | TSGSETPGSPAGSPTSTEEGTSESATPESGPGTSTEPSEGSAPGTSTEPSEGS | |
| | APGSPAGSPTSTEEGTSTEPSEGSAPGTSTEPSEGSAPGTSESATPESGPGTS | |
| | TEPSEGSAPGTSESATPESGPGSEPATSGSETPGTSTEPSEGSAPGTSTEPSE | |
| | GSAPGTSESATPESGPGTSESATPESGPGSPAGSPTSTEEGTSESATPESGPG | |
| | SEPATSGSETPGTSESATPESGPGTSTEPSEGSAPGTSTEPSEGSAPGTSTEP | |
| | SEGSAPGTSTEPSEGSAPGTSTEPSEGSAPGTSTEPSEGSAPGSPAGSPTSTE | |
| | EGTESASR | |
| AE576_R1 | SAGSPTEEGTSESATPESGPGSEPATSGSETPGTSESATPESGPGTSTEPSEG | 708 |
| | SAPGTSTEPSEGSAPGTSTEPSEGSAPGTSTEPSEGSAPGTSTEPSEGSAPGT | |
| | STEPSEGSAPGSPAGSPTSTEEGTSTEPSEGSAPGTSESATPESGPGSEPATS | |
| | GSETPGTSESATPESGPGSEPATSGSETPGTSESATPESGPGTSTEPSEGSAP | |
| | GTSESATPESGPGSPAGSPTSTEEGSPAGSPTSTEEGSPAGSPTSTEEGTSES | |
| | ATPESGPGTSTEPSEGSAPGTSESATPESGPGSEPATSGSETPGTSESATPES | |
| | GPGSEPATSGSETPGTSESATPESGPGTSTEPSEGSAPGSPAGSPTSTEEGTS | |
| | ESATPESGPGSEPATSGSETPGTSESATPESGPGSPAGSPTSTEEGSPAGSPT | |
| | STEEGTSTEPSEGSAPGTSESATPESGPGTSESATPESGPGTSESATPESGPG | |
| | SEPATSGSETPGSEPATSGSETPGSPAGSPTSTEEGTSTEPSEGSAPGTSTEP | |
| | SEGSAPGSEPATSGSETPGTSESATPESGPGTSTEPSEGSAPSASR | |
| AE864_R1 | SAGSPGSPAGSPTSTEEGTSESATPESGPGTSTEPSEGSAPGSPAGSPTSTEE | 709 |
| | GTSTEPSEGSAPGTSTEPSEGSAPGTSESATPESGPGSEPATSGSETPGSEPA | |
| | TSGSETPGSPAGSPTSTEEGTSESATPESGPGTSTEPSEGSAPGTSTEPSEGS | |
| | APGSPAGSPTSTEEGTSTEPSEGSAPGTSTEPSEGSAPGTSESATPESGPGTS | |
| | TEPSEGSAPGTSESATPESGPGSEPATSGSETPGTSTEPSEGSAPGTSTEPSE | |
| | GSAPGTSESATPESGPGTSESATPESGPGSPAGSPTSTEEGTSESATPESGPG | |
| | SEPATSGSETPGTSESATPESGPGTSTEPSEGSAPGTSTEPSEGSAPGTSTEP | |
| | SEGSAPGTSTEPSEGSAPGTSTEPSEGSAPGTSTEPSEGSAPGSPAGSPTSTE | |
| | EGTSTEPSEGSAPGTSESATPESGPGSEPATSGSETPGTSESATPESGPGSEP | |
| | ATSGSETPGTSESATPESGPGTSTEPSEGSAPGTSESATPESGPGSPAGSPTS | |
| | TEEGSPAGSPTSTEEGSPAGSPTSTEEGTSESATPESGPGTSTEPSEGSAPGT | |
| | SESATPESGPGSEPATSGSETPGTSESATPESGPGSEPATSGSETPGTSESAT | |
| | PESGPGTSTEPSEGSAPGSPAGSPTSTEEGTSESATPESGPGSEPATSGSETP | |
| | GTSESATPESGPGSPAGSPTSTEEGSPAGSPTSTEEGTSTEPSEGSAPGTSES | |
| | ATPESGPGTSESATPESGPGTSESATPESGPGSEPATSGSETPGSEPATSGSE | |
| | TPGSPAGSPTSTEEGTSTEPSEGSAPGTSTEPSEGSAPGSEPATSGSETPGTS | |
| | ESATPESGPGTESASR | |
| AE712 | PGSPAGSPTSTEEGTSESATPESGPGTSTEPSEGSAPGSPAGSPTSTEEGTST | 710 |
| | EPSEGSAPGTSTEPSEGSAPGTSESATPESGPGSEPATSGSETPGSEPATSGS | |
| | ETPGSPAGSPTSTEEGTSESATPESGPGTSTEPSEGSAPGTSTEPSEGSAPGS | |
| | PAGSPTSTEEGTSTEPSEGSAPGTSTEPSEGSAPGTSESATPESGPGTSTEPS | |
| | EGSAPGTSESATPESGPGSEPATSGSETPGTSTEPSEGSAPGTSTEPSEGSAP | |
| | GTSESATPESGPGTSESATPESGPGSPAGSPTSTEEGTSESATPESGPGSEPA | |
| | TSGSETPGTSESATPESGPGTSTEPSEGSAPGTSTEPSEGSAPGTSTEPSEGS | |
| | APGTSTEPSEGSAPGTSTEPSEGSAPGTSTEPSEGSAPGSPAGSPTSTEEGTS | |
| | TEPSEGSAPGTSESATPESGPGSEPATSGSETPGTSESATPESGPGSEPATSG | |
| | SETPGTSESATPESGPGTSTEPSEGSAPGTSESATPESGPGSPAGSPTSTEEG | |
| | SPAGSPTSTEEGSPAGSPTSTEEGTSESATPESGPGTSTEPSEGSAPGTSESA | |
| | TPESGPGSEPATSGSETPGTSESATPESGPGSEPATSGSETPGTSESATPESG | |
| | PGTSTEPSEGSAPGSPAGSPTSTEEGTSESATPESGPGSEPATSGSETPGTSE | |
| | SATPESGPGSPAGSPTSTEAHHH | |
| AE864_R2 | GSPGAGSPAGSPTSTEEGTSESATPESGPGTSTEPSEGSAPGSPAGSPTSTEE | 711 |
| | GTSTEPSEGSAPGTSTEPSEGSAPGTSESATPESGPGSEPATSGSETPGSEPA | |
| | TSGSETPGSPAGSPTSTEEGTSESATPESGPGTSTEPSEGSAPGTSTEPSEGS | |
| | APGSPAGSPTSTEEGTSTEPSEGSAPGTSTEPSEGSAPGTSESATPESGPGTS | |
| | TEPSEGSAPGTSESATPESGPGSEPATSGSETPGTSTEPSEGSAPGTSTEPSE | |
| | GSAPGTSESATPESGPGTSESATPESGPGSPAGSPTSTEEGTSESATPESGPG | |
| | SEPATSGSETPGTSESATPESGPGTSTEPSEGSAPGTSTEPSEGSAPGTSTEP | |
| | SEGSAPGTSTEPSEGSAPGTSTEPSEGSAPGTSTEPSEGSAPGSPAGSPTSTE | |
| | EGTSTEPSEGSAPGTSESATPESGPGSEPATSGSETPGTSESATPESGPGSEP | |
| | ATSGSETPGTSESATPESGPGTSTEPSEGSAPGTSESATPESGPGSPAGSPTS | |
| | TEEGSPAGSPTSTEEGSPAGSPTSTEEGTSESATPESGPGTSTEPSEGSAPGT | |
| | SESATPESGPGSEPATSGSETPGTSESATPESGPGSEPATSGSETPGTSESAT | |
| | PESGPGTSTEPSEGSAPGSPAGSPTSTEEGTSESATPESGPGSEPATSGSETP | |
| | GTSESATPESGPGSPAGSPTSTEEGSPAGSPTSTEEGTSTEPSEGSAPGTSES | |
| | ATPESGPGTSESATPESGPGTSESATPESGPGSEPATSGSETPGSEPATSGSE | |
| | TPGSPAGSPTSTEEGTSTEPSEGSAPGTSTEPSEGSAPGSEPATSGSETPGTS | |
| | ESATPESGPGTESASR | |
| AE288_3 | SPAGSPTSTEEGTSESATPESGPGTSTEPSEGSAPGTSESATPESGPGSEPAT | 712 |
| | SGSETPGTSESATPESGPGSEPATSGSETPGTSESATPESGPGTSTEPSEGSA | |
| | PGSPAGSPTSTEEGTSESATPESGPGSEPATSGSETPGTSESATPESGPGSPA | |
| | GSPTSTEEGSPAGSPTSTEEGTSTEPSEGSAPGTSESATPESGPGTSESATPE | |
| | SGPGTSESATPESGPGSEPATSGSETPGSEPATSGSETPGSPAGSPTSTEEGT | |
| | STEPSEGSAPGTSTEPSEGSAPG | |
| AE284 | GTSESATPESGPGSEPATSGSETPGTSESATPESGPGSEPATSGSETPGTSES | 713 |
| | ATPESGPGTSTEPSEGSAPGSPAGSPTSTEEGTSESATPESGPGSEPATSGSE | |
| | TPGTSESATPESGPGSPAGSPTSTEEGSPAGSPTSTEEGTSTEPSEGSAPGTS | |
| | ESATPESGPGTSESATPESGPGTSESATPESGPGSEPATSGSETPGSEPATSG | |
| | SETPGSPAGSPTSTEEGTSTEPSEGSAPGTSTEPSEGSAPGSEPATSGSETPG | |
| | TSESATPESGPGTSTEPSE | |
| AE292 | SPAGSPTSTEEGTSESATPESGPGTSTEPSEGSAPGTSESATPESGPGSEPAT | 714 |
| | SGSETPGTSESATPESGPGSEPATSGSETPGTSESATPESGPGTSTEPSEGSA | |
| | PGSPAGSPTSTEEGTSESATPESGPGSEPATSGSETPGTSESATPESGPGSPA | |
| | GSPTSTEEGSPAGSPTSTEEGTSTEPSEGSAPGTSESATPESGPGTSESATPE | |
| | SGPGTSESATPESGPGSEPATSGSETPGSEPATSGSETPGSPAGSPTSTEEGT | |
| | STEPSEGSAPGTSTEPSEGSAPGGSAP | |
| AE864_2 | AGSPTSTEEGTSESATPESGPGTSTEPSEGSAPGSPAGSPTSTEEGTSTEPSE | 715 |
| | GSAPGTSTEPSEGSAPGTSESATPESGPGSEPATSGSETPGSEPATSGSETPG | |
| | SPAGSPTSTEEGTSESATPESGPGTSTEPSEGSAPGTSTEPSEGSAPGSPAGS | |
| | PTSTEEGTSTEPSEGSAPGTSTEPSEGSAPGTSESATPESGPGTSTEPSEGSA | |
| | PGTSESATPESGPGSEPATSGSETPGTSTEPSEGSAPGTSTEPSEGSAPGTSE | |
| | SATPESGPGTSESATPESGPGSPAGSPTSTEEGTSESATPESGPGSEPATSGS | |
| | ETPGTSESATPESGPGTSTEPSEGSAPGTSTEPSEGSAPGTSTEPSEGSAPGT | |
| | STEPSEGSAPGTSTEPSEGSAPGTSTEPSEGSAPGSPAGSPTSTEEGTSTEPS | |
| | EGSAPGTSESATPESGPGSEPATSGSETPGTSESATPESGPGSEPATSGSETP | |
| | GTSESATPESGPGTSTEPSEGSAPGTSESATPESGPGSPAGSPTSTEEGSPAG | |
| | SPTSTEEGSPAGSPTSTEEGTSESATPESGPGTSTEPSEGSAPGTSESATPES | |
| | GPGSEPATSGSETPGTSESATPESGPGSEPATSGSETPGTSESATPESGPGTS | |
| | TEPSEGSAPGSPAGSPTSTEEGTSESATPESGPGSEPATSGSETPGTSESATP | |
| | ESGPGSPAGSPTSTEEGSPAGSPTSTEEGTSTEPSEGSAPGTSESATPESGPG | |
| | TSESATPESGPGTSESATPESGPGSEPATSGSETPGSEPATSGSETPGSPAGS | |
| | PTSTEEGTSTEPSEGSAPGTSTEPSEGSAPGSEPATSGSETPGTSESATPESG | |
| | PGTSTEPSEGAAEPEA | |
| AE867 | GSPAGSPTSTEEGTSESATPESGPGTSTEPSEGSAPGSPAGSPTSTEEGTSTE | 716 |
| | PSEGSAPGTSTEPSEGSAPGTSESATPESGPGSEPATSGSETPGSEPATSGSE | |
| | TPGSPAGSPTSTEEGTSESATPESGPGTSTEPSEGSAPGTSTEPSEGSAPGSP | |
| | AGSPTSTEEGTSTEPSEGSAPGTSTEPSEGSAPGTSESATPESGPGTSTEPSE | |
| | GSAPGTSESATPESGPGSEPATSGSETPGTSTEPSEGSAPGTSTEPSEGSAPG | |
| | TSESATPESGPGTSESATPESGPGSPAGSPTSTEEGTSESATPESGPGSEPAT | |
| | SGSETPGTSESATPESGPGTSTEPSEGSAPGTSTEPSEGSAPGTSTEPSEGSA | |
| | PGTSTEPSEGSAPGTSTEPSEGSAPGTSTEPSEGSAPGSPAGSPTSTEEGTST | |
| | EPSEGSAPGTSESATPESGPGSEPATSGSETPGTSESATPESGPGSEPATSGS | |
| | ETPGTSESATPESGPGTSTEPSEGSAPGTSESATPESGPGSPAGSPTSTEEGS | |
| | PAGSPTSTEEGSPAGSPTSTEEGTSESATPESGPGTSTEPSEGSAPGTSESAT | |
| | PESGPGSEPATSGSETPGTSESATPESGPGSEPATSGSETPGTSESATPESGP | |
| | GTSTEPSEGSAPGSPAGSPTSTEEGTSESATPESGPGSEPATSGSETPGTSES | |
| | ATPESGPGSPAGSPTSTEEGSPAGSPTSTEEGTSTEPSEGSAPGTSESATPES | |
| | GPGTSESATPESGPGTSESATPESGPGSEPATSGSETPGSEPATSGSETPGSP | |
| | AGSPTSTEEGTSTEPSEGSAPGTSTEPSEGSAPGSEPATSGSETPGTSESATP | |
| | ESGPGTSTEPSEGAAEPEA | |
| AE867_2 | SPGSPAGSPTSTEEGTSESATPESGPGTSTEPSEGSAPGSPAGSPTSTEEGTS | 717 |
| | TEPSEGSAPGTSTEPSEGSAPGTSESATPESGPGSEPATSGSETPGSEPATSG | |
| | SETPGSPAGSPTSTEEGTSESATPESGPGTSTEPSEGSAPGTSTEPSEGSAPG | |
| | SPAGSPTSTEEGTSTEPSEGSAPGTSTEPSEGSAPGTSESATPESGPGTSTEP | |
| | SEGSAPGTSESATPESGPGSEPATSGSETPGTSTEPSEGSAPGTSTEPSEGSA | |
| | PGTSESATPESGPGTSESATPESGPGSPAGSPTSTEEGTSESATPESGPGSEP | |
| | ATSGSETPGTSESATPESGPGTSTEPSEGSAPGTSTEPSEGSAPGTSTEPSEG | |
| | SAPGTSTEPSEGSAPGTSTEPSEGSAPGTSTEPSEGSAPGSPAGSPTSTEEGT | |
| | STEPSEGSAPGTSESATPESGPGSEPATSGSETPGTSESATPESGPGSEPATS | |
| | GSETPGTSESATPESGPGTSTEPSEGSAPGTSESATPESGPGSPAGSPTSTEE | |
| | GSPAGSPTSTEEGSPAGSPTSTEEGTSESATPESGPGTSTEPSEGSAPGTSES | |
| | ATPESGPGSEPATSGSETPGTSESATPESGPGSEPATSGSETPGTSESATPES | |
| | GPGTSTEPSEGSAPGSPAGSPTSTEEGTSESATPESGPGSEPATSGSETPGTS | |
| | ESATPESGPGSPAGSPTSTEEGSPAGSPTSTEEGTSTEPSEGSAPGTSESATP | |
| | ESGPGTSESATPESGPGTSESATPESGPGSEPATSGSETPGSEPATSGSETPG | |
| | SPAGSPTSTEEGTSTEPSEGSAPGTSTEPSEGSAPGSEPATSGSETPGTSESA | |
| | TPESGPGTSTEPSEGSAPG | |
| | PGSPAGSPTSTEEGTSESATPESGPGTSTEPSEGSAPGSPAGSPTSTEEGTST | 718 |
| | ETPGSPAGSPTSTEEGTSESATPESGPGTSTEPSEGSAPGTSTEPSEGSAPGS | |
| | PAGSPTSTEEGTSTEPSEGSAPGTSTEPSEGSAPGTSESATPESGPGTSTEPS | |
| | EGSAPGTSESATPESGPGSEPATSGSETPGTSTEPSEGSAPGTSTEPSEGSAP | |
| | GTSESATPESGPGTSESATPESGPGSPAGSPTSTEEGTSESATPESGPGSEPA | |
| | TSGSETPGTSESATPESGPGTSTEPSEGSAPGTSTEPSEGSAPGTSTEPSEGS | |
| | APGTSTEPSEGSAPGTSTEPSEGSAPGTSTEPSEGSAPGSPAGSPTSTEEGTS | |
| | TEPSEGSAPGTSESATPESGPGSEPATSGSETPGTSESATPESGPGSEPATSG | |
| | SETPGTSESATPESGPGTSTEPSEGSAPGTSESATPESGPGSPAGSPTSTEEG | |
| | SPAGSPTSTEEGSPAGSPTSTEEGTSESATPESGPGTSTEPSEGSAPGTSESA | |
| | TPESGPGSEPATSGSETPGTSESATPESGPGSEPATSGSETPGTSESATPESG | |
| | PGTSTEPSEGSAPGSPAGSPTSTEEGTSESATPESGPGSEPATSGSETPGTSE | |
| | SATPESGPGSPAGSPTSTEEGSPAGSPTSTEEGTSTEPSEGSAPGTSESATPE | |
| | SGPGTSESATPESGPGTSESATPESGPGSEPATSGSETPGSEPATSGSETPGS | |
| | PAGSPTSTEEGTSTEPSEGSAPGTSTEPSEGSAPGSEPATSGSETPGTSESAT | |
| | PESGPGTSTEPSEGAAEPEA | |
| AE144_7A | GSPAGSPTSTEEGTSESATPESGPGTSTEPSEGSAPGSPAGSPTSTEEGTSTE | 922 |
| | PSEGSAPGTSTEPSEGSAPGTSESATPESGPGSEPATSGSETPGSEPATSGSE | |
| | TPGSPAGSPTSTEEGTSESATPESGPGTSTEPSEGSAP | |
| AE292 | SPAGSPTSTEEGTSESATPESGPGTSTEPSEGSAPGTSESATPESGPGSEPAT | 923 |
| | SGSETPGTSESATPESGPGSEPATSGSETPGTSESATPESGPGTSTEPSEGSA | |
| | PGSPAGSPTSTEEGTSESATPESGPGSEPATSGSETPGTSESATPESGPGSPA | |
| | GSPTSTEEGSPAGSPTSTEEGTSTEPSEGSAPGTSESATPESGPGTSESATPE | |
| | SGPGTSESATPESGPGSEPATSGSETPGSEPATSGSETPGSPAGSPTSTEEGT | |
| | STEPSEGSAPGTSTEPSEGSAPGGSAP | |
| AE293 | PGSPAGSPTSTEEGTSESATPESGPGTSTEPSEGSAPGSPAGSPTSTEEGTST | 924 |
| | EPSEGSAPGTSTEPSEGSAPGTSESATPESGPGSEPATSGSETPGSEPATSGS | |
| | ETPGSPAGSPTSTEEGTSESATPESGPGTSTEPSEGSAPGTSTEPSEGSAPGS | |
| | PAGSPTSTEEGTSTEPSEGSAPGTSTEPSEGSAPGTSESATPESGPGTSTEPS | |
| | EGSAPGTSESATPESGPGSEPATSGSETPGTSTEPSEGSAPGTSTEPSEGSAP | |
| | GTSESATPESGPGTSESATPEGAAEPEA | |
| AE300 | PGSPAGSPTSTEEGTSESATPESGPGTSTEPSEGSAPGSPAGSPTSTEEGTST | 925 |
| | EPSEGSAPGTSTEPSEGSAPGTSESATPESGPGSEPATSGSETPGSEPATSGS | |
| | ETPGSPAGSPTSTEEGTSESATPESGPGTSTEPSEGSAPGTSTEPSEGSAPGS | |
| | PAGSPTSTEEGTSTEPSEGSAPGTSTEPSEGSAPGTSESATPESGPGTSTEPS | |
| | EGSAPGTSESATPESGPGSEPATSGSETPGTSTEPSEGSAPGTSTEPSEGSAP | |
| | GTSESATPESGPGTSESATPESGPGSPAGAAEPEA | |
| AE584 | PGSPAGSPTSTEEGTSESATPESGPGTSTEPSEGSAPGSPAGSPTSTEEGTST | 926 |
| | EPSEGSAPGTSTEPSEGSAPGTSESATPESGPGSEPATSGSETPGSEPATSGS | |
| | ETPGSPAGSPTSTEEGTSESATPESGPGTSTEPSEGSAPGTSTEPSEGSAPGS | |
| | PAGSPTSTEEGTSTEPSEGSAPGTSTEPSEGSAPGTSESATPESGPGTSTEPS | |
| | EGSAPGTSESATPESGPGSEPATSGSETPGTSTEPSEGSAPGTSTEPSEGSAP | |
| | GTSESATPESGPGTSESATPESGPGSPAGSPTSTEEGTSESATPESGPGSEPA | |
| | TSGSETPGTSESATPESGPGTSTEPSEGSAPGTSTEPSEGSAPGTSTEPSEGS | |
| | APGTSTEPSEGSAPGTSTEPSEGSAPGTSTEPSEGSAPGSPAGSPTSTEEGTS | |
| | TEPSEGSAPGTSESATPESGPGSEPATSGSETPGTSESATPESGPGSEPATSG | |
| | SETPGTSESATPESGPGTSTEPSEGSAPGTSESATPESGPGSPAGSPTSTEEG | |
| | SPAGSPTSTEEGSPAGSPTSTEEGTSESATPESGPGTSTEPSEGSAPGAAEPE | |
| | A | |
| AE870 | PGSPAGSPTSTEEGTSESATPESGPGTSTEPSEGSAPGSPAGSPTSTEEGTST | 927 |
| | EPSEGSAPGTSTEPSEGSAPGTSESATPESGPGSEPATSGSETPGSEPATSGS | |
| | ETPGSPAGSPTSTEEGTSESATPESGPGTSTEPSEGSAPGTSTEPSEGSAPGS | |
| | PAGSPTSTEEGTSTEPSEGSAPGTSTEPSEGSAPGTSESATPESGPGTSTEPS | |
| | EGSAPGTSESATPESGPGSEPATSGSETPGTSTEPSEGSAPGTSTEPSEGSAP | |
| | GTSESATPESGPGTSESATPESGPGSPAGSPTSTEEGTSESATPESGPGSEPA | |
| | TSGSETPGTSESATPESGPGTSTEPSEGSAPGTSTEPSEGSAPGTSTEPSEGS | |
| | APGTSTEPSEGSAPGTSTEPSEGSAPGTSTEPSEGSAPGSPAGSPTSTEEGTS | |
| | TEPSEGSAPGTSESATPESGPGSEPATSGSETPGTSESATPESGPGSEPATSG | |
| | SETPGTSESATPESGPGTSTEPSEGSAPGTSESATPESGPGSPAGSPTSTEEG | |
| | SPAGSPTSTEEGSPAGSPTSTEEGTSESATPESGPGTSTEPSEGSAPGTSESA | |
| | TPESGPGSEPATSGSETPGTSESATPESGPGSEPATSGSETPGTSESATPESG | |
| | PGTSTEPSEGSAPGSPAGSPTSTEEGTSESATPESGPGSEPATSGSETPGTSE | |
| | SATPESGPGSPAGSPTSTEEGSPAGSPTSTEEGTSTEPSEGSAPGTSESATPE | |
| | SGPGTSESATPESGPGTSESATPESGPGSEPATSGSETPGSEPATSGSETPGS | |
| | PAGSPTSTEEGTSTEPSEGSAPGTSTEPSEGSAPGSEPATSGSETPGTSESAT | |
| | PESGPGTSTEPSEGSAPGEPEA | |

[0184] The disclosure contemplates compositions of any of the embodiments described herein comprising XTEN of intermediate lengths to those of Table 7, as well as XTEN of longer lengths than those of Table 7, such as those in which motifs of 12 amino acids of Table 6 are added to the N- or C-terminus of an XTEN of Table 7.

[0185] In another embodiment, the disclosure contemplates polypeptide compositions of any of the embodiments described herein comprising an XTEN1 and an XTEN2 that can further comprise a His tag of HHHHHH (SEQ ID NO: 1150) or HHHHHHHH (SEQ ID NO: 1151) at the N-terminus and/or the sequence EPEA (SEQ ID NO: 1149) at the C-terminus, respectively, of the polypeptide composition to facilitate the purification of the composition to at least 90%, 91%, 92%, 93%, 94%, 95%, 96%, 97%, 98%, or at least 99% purity by chromatography methods known in the art, including but not limited to IMAC chromatography, C-tagXL affinity matrix, and other such methods, including but not limited to those described in the Examples, below.

[0186] Additional examples of XTEN sequences that can be used according to the present disclosure and are disclosed in US Patent Publication Nos. 2010/0239554 A1, 2010/0323956 A1, 2011/0046060 A1, 2011/0046061 A1, 2011/0077199 A1, or 2011/0172146 A1, or International Patent Publication Nos. WO 2010091122 A1, WO 2010144502 A2, WO 2010144508 A1, WO 2011028228 A1, WO 2011028229 A1, WO 2011028344 A2, WO 2014/011819 A2, or WO 2015/023891.

### V). Target Cell Marker Antigen Binding Fragments

[0187] In another aspect, the present disclosure relates to antigen binding fragments that have specific binding affinity for target cell marker antigens other than CD3 that can be incorporated into any of the subject composition embodiments described herein. The resulting bispecific compositions—having a first antigen binding fragment (AF1) with binding affinity to CD3 linked to a second antigen binding fragment (AF2) with binding affinity to a second non-CD3 antigen by a short, flexible peptide linker—are bispecific, with each antigen binding fragment having specific binding affinity to their respective ligands. It will be understood that in such compositions, an antigen binding fragment directed against a target cell marker of a disease tissue is used in combination with a second antigen binding fragment directed towards an effector cell marker in order to bring an effector cell in close proximity to the cell of a disease tissue in order to effect the cytolysis of the cell of the diseased tissue. Further, the AF1 and AF2 can be incorporated into the specifically designed polypeptides comprising cleavable release segments and XTEN in order to confer prodrug characteristics on the compositions that becomes activated by release of the fused AF1 and AF2 upon the cleavage of the release segments when in proximity to the disease tissue having proteases capable of cleaving the release segments in one or more locations in the release segment sequence.

[0188] In one embodiment, the polypeptides of any of the subject composition embodiments described herein can comprise an AF2 having specific binding affinity for a target cell marker expressed on a cell surface, in the cytoplasmic membrane, or within a target cell associated with cancers, autoimmune diseases, inflammatory diseases and other conditions where localized activation of the polypeptide is desirable. In one embodiment, the antigens against which the AF2 has specific binding affinity are selected from antigens that include, but are not limited to, 1-40-β-amyloid, 4-1BB, 5AC, 5T4, 707-AP, A kinase anchor protein 4 (AKAP-4), activin receptor type-2B (ACVR2B), activin receptor-like kinase 1 (ALK1), adenocarcinoma antigen, adipophilin, adrenoceptor β3 (ADRB3), AGS-22M6, α folate receptor, α-fetoprotein (AFP), AIM-2, anaplastic lymphoma kinase (ALK), androgen receptor, angiopoietin 2, angiopoietin 3, angiopoietin-binding cell surface receptor 2 (Tie 2), anthrax toxin, AOC3 (VAP-1), B cell maturation antigen (BCMA), B7-H3 (CD276), Bacillus anthracis anthrax, B-cell activating factor (BAFF), B-lymphoma cell, bone marrow stromal cell antigen 2 (BST2), Brother of the Regulator of Imprinted Sites (BORIS), C242 antigen, C5, CA-125, cancer antigen 125 (CA-125 or MUC16), Cancer/testis antigen 1 (NY-ESO-1), Cancer/testis antigen 2 (LAGE-1a), carbonic anhydrase 9 (CA-IX), Carcinoembryonic antigen (CEA), cardiac myosin, CCCTC-Binding Factor (CTCF), CCL11 (eotaxin-1), CCR4, CCR5, CCR6, CCR7, CCR8, CCR9, CD11, CD123, CD125, CD140a, CD147 (basigin), CD15, CD152, CD154 (CD40L), CD171, CD179a, CD18, CD19, CD2, CD20, CD200, CD22, CD221, CD23 (IgE receptor), CD24, CD25 (α chain of IL-2 receptor), CD27, CD274, CD28, CD3, CD3 ε, CD30, CD300 molecule-like family member f (CD300LF), CD319 (SLAMF7), CD33, CD37, CD38, CD4, CD40, CD40 ligand, CD41, CD44 v7, CD44 v8, CD44 v6, CD5, CD51, CD52, CD56, CD6, CD70, CD72, CD74, CD79A, CD79B, CD80, CD97, CEA-related antigen, CFD, ch4D5, chromosome X open reading frame 61 (CXORF61), claudin 18.2 (CLDN18.2), claudin 6 (CLDN6), Clostridium difficile, clumping factor A, CLCA2, colony stimulating factor 1 receptor (CSF1R), CSF2, CTLA-4, C-type lectin domain family 12 member A (CLEC12A), C-type lectin-like molecule-1 (CLL-1 or CLECL1), C-X-C chemokine receptor type 4, cyclin B1, cytochrome P4501B1 (CYP1B1), cyp-B, cytomegalovirus, cytomegalovirus glycoprotein B, dabigatran, DLL4, DPP4, DR5, E. coli shiga toxin type-1, E. coli shiga toxin type-2, ecto-ADP-ribosyltransferase 4 (ART4), EGF-like module-containing mucin-like hormone receptor-like 2 (EMR2), EGF-like-domain multiple 7 (EGFL7), elongation factor 2 mutated (ELF2M), endotoxin, Ephrin A2, Ephrin B2, ephrin type-A receptor 2, epidermal growth factor receptor (EGFR), epidermal growth factor receptor variant III (EGFRvIII), episialin, epithelial cell adhesion molecule (EpCAM), epithelial glycoprotein 2 (EGP-2), epithelial glycoprotein 40 (EGP-40), ERBB2, ERBB3, ERBB4, ERG (transmembrane protease, serine 2 (TMPRSS2) ETS fusion gene), Escherichia coli, ETS translocation-variant gene 6, located on chromosome 12p (ETV6-AML), F protein of respiratory syncytial virus, FAP, Fc fragment of IgA receptor (FCAR or CD89), Fc receptor-like 5 (FCRLS), fetal acetylcholine receptor, fibrin II β chain, fibroblast activation protein α (FAP), fibronectin extra domain-B, FGF-5, Fms-Like Tyrosine Kinase 3 (FLT3), folate binding protein (FBP), folate hydrolase, folate receptor 1, folate receptor α, folate receptor β, Fos-related antigen 1, Frizzled receptor, Fucosyl GM1, G250, G protein-coupled receptor 20 (GPR20), G protein-coupled receptor class C group 5, member D (GPRC5D), ganglioside G2 (GD2), GD3 ganglioside, glycoprotein 100 (gp100), glypican-3 (GPC3), GMCSF receptor α-chain, GPNMB, GnT-V, growth differentiation factor 8, GUCY2C, heat shock protein 70-2 mutated (mut hsp70-2), hemagglutinin, Hepatitis A virus cellular receptor 1 (HAVCR1), hepatitis B surface antigen, hepatitis B virus, HER1, HER2/neu, HER3, hexasaccharide portion of globoH glycoceramide (GloboH), HGF, HHGFR, high molecular weight-melanoma-associated antigen (HMW-MAA), histone complex, HIV-1, HLA-DR, HNGF, Hsp90, HST-2 (FGF6), human papilloma virus E6 (HPV E6), human papilloma virus E7 (HPV E7), human scatter factor receptor kinase, human Telomerase reverse transcriptase (hTERT), human TNF, ICAM-1 (CD54), iCE, IFN-α, IFN-β, IFN-γ, IgE, IgE Fc region, IGF-1, IGF-1 receptor, IGHE, IL-12, IL-13, IL-17, IL-17A, IL-17F, IL-1β, IL-20, IL-22, IL-23, IL-31, IL-31RA, IL-4, IL-5, IL-6, IL-6 receptor, IL-9, immunoglobulin lambda-like polypeptide 1 (IGLL1), influenza A hemagglutinin, insulin-like growth factor 1 receptor (IGF-I receptor), insulin-like growth factor 2 (ILGF2), integrin α4β7, integrin β2, integrin α2, integrin α4, integrin α5β1, integrin α7β7, integrin αIIbβ3, integrin αvβ3, interferon α/β receptor, interferon γ-induced protein, Interleukin 11 receptor α (IL-11Rα), Interleukin-13 receptor subunit α-2 (IL-13Ra2 or CD213A2), intestinal carboxyl esterase, kinase domain region (KDR), KIR2D, KIT (CD117), L1-cell adhesion molecule (L1-CAM), legumain, leukocyte immunoglobulin-like receptor subfamily A member 2 (LILRA2), leukocyte-associated immunoglobulin-like receptor 1 (LAIR1), lymphocyte antigen 6 (Ly-6), Lewis-Y antigen, LFA-1 (CD11a), LINGO-1, lipoteichoic acid, LOXL2, L-selectin (CD62L), lymphocyte antigen 6 complex, locus K 9 (LY6K), lymphocyte antigen 75 (LY75), lymphocyte-specific protein tyrosine kinase (LCK), lymphotoxin-α (LT-α) or Tumor necrosis factor-β (TNF-β), Lysosomal Associated Membrane Protein 1 (LAMP1), macrophage migration inhibitory factor (MIF or MMIF), M-CSF, mammary gland differentiation antigen (NY-BR-1), MCP-1, melanoma cancer testis antigen-1 (MAD-CT-1), melanoma cancer testis antigen-2 (MAD-CT-2), melanoma inhibitor of apoptosis (ML-IAP), melanoma-associated antigen 1 (MAGE-A1), mesothelin, mucin 1, cell surface associated (MUC1), MUC-2, MUC3, MUC4, MUC5AC, MUC5B, MUC7, MUC16, mucin CanAg, myelin-associated glycoprotein, myostatin, N-Acetyl glucosaminyl-transferase V (NA17), NCA-90 (granulocyte antigen), Nectin 4, nerve growth factor (NGF), neural apoptosis-regulated proteinase 1, neural cell adhesion molecule (NCAM), neurite outgrowth inhibitor (e.g., NOGO-A, NOGO-B, NOGO-C), neuropilin-1 (NRP1), N-glycolylneuraminic acid, NKG2D, Notch receptor, o-acetyl-GD2 ganglioside (OAcGD2), olfactory receptor 51E2 (OR51E2), oncofetal antigen (h5T4), oncogene fusion protein consisting of breakpoint cluster region (BCR) and Abelson murine leukemia viral oncogene homolog 1 (Abl) (bcr-abl), Oryctolagus cuniculus, OX-40, oxLDL, p53 mutant, paired box protein Pax-3 (PAX3), paired box protein Pax-5 (PAXS), pannexin 3 (PANX3), P-cadherin, phosphate-sodium co-transporter, phosphatidylserine, placenta-specific 1 (PLAC1), platelet-derived growth factor receptor α (PDGF-R α), platelet-derived growth factor receptor β (PDGFR-β), polysialic acid, proacrosin binding protein sp32 (OY-TES1), programmed cell death protein 1 (PD-1), Programmed death-ligand 1 (PD-L1), proprotein convertase subtilisin/kexin type 9 (PCSK9), prostase, prostate carcinoma tumor antigen-1 (PCTA-1 or Galectin 8), melanoma antigen recognized by T cells 1 (MelanA or MART1), P15, P53, PRAME, prostate stem cell antigen (PSCA), prostate-specific membrane antigen (PSMA), prostatic acid phosphatase (PAP), prostatic carcinoma cells, prostein, Protease Serine 21 (Testisin or PRSS21), Proteasome (Prosome, Macropain) Subunit, β Type, 9 (LMP2), Pseudomonas aeruginosa, rabies virus glycoprotein, RAGE, Ras Homolog Family Member C (RhoC), receptor activator of nuclear factor kappa-B ligand (RANKL), Receptor for Advanced Glycation Endproducts (RAGE-1), receptor tyrosine kinase-like orphan receptor 1 (ROR1), renal ubiquitous 1 (RU1), renal ubiquitous 2 (RU2), respiratory syncytial virus, Rh blood group D antigen, Rhesus factor, sarcoma translocation breakpoints, sclerostin (SOST), selectin P, sialyl Lewis adhesion molecule (sLe), sperm protein 17 (SPA17), sphingosine-1-phosphate, squamous cell carcinoma antigen recognized by T Cells 1, 2, and 3 (SART1, SART2, and SART3), stage-specific embryonic antigen-4 (SSEA-4), Staphylococcus aureus, STEAP1, syndecan 1 (SDC1)+A314, SOX10, survivin, survivin-2B, synovial sarcoma, X breakpoint 2 (SSX2), T-cell receptor, TCR F Alternate Reading Frame Protein (TARP), telomerase, TEM1, tenascin C, TGF-β (e.g., TGF-β1, TGF-β2, TGF-β3), thyroid stimulating hormone receptor (TSHR), tissue factor pathway inhibitor (TFPI), Tn antigen ((Tn Ag) or (GalNAcα-Ser/Thr)), TNF receptor family member B cell maturation (BCMA), TNF-α, TRAIL-R1, TRAIL-R2, TRG, transglutaminase 5 (TGS5), tumor antigen CTAA16.88, tumor endothelial marker 1 (TEM1/CD248), tumor endothelial marker 7-related (TEM7R), tumor protein p53 (p53), tumor specific glycosylation of MUC1, tumor-associated calcium signal transducer 2 (TROP-2), tumor-associated glycoprotein 72 (TAG72), tumor-associated glycoprotein 72 (TAG-72)+A327, TWEAK receptor, tyrosinase, tyrosinase-related protein 1 (TYRP1 or glycoprotein 75), tyrosinase-related protein 2 (TYRP2), uroplakin 2 (UPK2), vascular endothelial growth factor (e.g., VEGF-A, VEGF-B, VEGF-C, VEGF-D, PIGF), vascular endothelial growth factor receptor 1 (VEGFR1), vascular endothelial growth factor receptor 2 (VEGFR2), vimentin, v-myc avian myelocytomatosis viral oncogene neuroblastoma derived homolog (MYCN), von Willebrand factor (VWF), Wilms tumor protein (WT1), X Antigen Family, Member 1A (XAGE1), β-amyloid, κ-light chain, Fibroblast Growth Factor Receptor 2 (FGFR2), LIV-1 Protein, estrogen regulated (LIV1, aka SLC39A6), Neurotrophic Receptor Tyrosine Kinase 1 (NTRK1, aka TRK), Ret Proto-Oncogene (RET), B Cell Maturation Antigen (BCMA, aka TNFRSF17), Transferrin Receptor (TFRC, aka CD71), Activated Leukocyte Cell Adhesion Molecule (ALCAM, aka CD166), Somatostatin Receptor 2 (SSTR2), KIT Proto-Oncogene Receptor Tyrosine Kinase (cKIT), V-Set Immunoregulatory Receptor (VSIR, aka VISTA), Glycoprotein Nmb (GPNMB), Delta Like Canonical Notch Ligand 3 (DLL3), Interleukin 3 Receptor Subunit Alpha (IL3RA, aka CD123), Lysosomal Associated Membrane Protein 1 (LAMP1), Cadherin 3, Type 1, P-Cadherin (CDH3), Ephrin A4 (EFNA4), Protein Tyrosine Kinase 7 (PTK7), Solute Carrier Family 34 Member 2 (SLC34A2, aka NaPi-2b), Guanylyl Cyclase C (GCC), PLAUR Domain Containing 3 (LYPD3, aka LY6 or C4.4a), Mucin 17, Cell Surface Associated (MUC17), Fms Related Receptor Tyrosine Kinase 3 (FLT3), NKG2D ligands (e.g. ULBP1, ULBP2, ULBP3, H60, Rae-1α, Rae-1β, Rae-1δ, Rae-1γ, MICA, MICB, hHLA-A), SLAM Family Member 7 (SLAMF7), Interleukin 13 Receptor Subunit Alpha 2 (IL13RA2), C-Type Lectin Domain Family 12 Member A (CLEC12A aka CLL-1), CEA Cell Adhesion Molecule 5 (CEACAM aka CD66e), Interleukin 3 Receptor Subunit Alpha (IL3RA), CD5 Molecule (CD5), UL16 Binding Protein 1 (ILBP1), V-Set Domain Containing T Cell Activation Inhibitor 1 (VTCN1 aka B7-H4), Chondroitin Sulfate Proteoglycan 4 (CSPG4), Syndecan 1 (SDC1 aka CD138), Interleukin 1 Receptor Accessory Protein (IL1RAP), Baculoviral IAP Repeat Containing 5 (BIRC5 aka Survivin), CD74 Molecule (CD74), Hepatitis A Virus Cellular Receptor 1 (HAVCR1 aka TIM1), SLIT and NTRK Like Family Member 6 (SILTRK6), CD37 Molecule (CD37), Coagulation Factor III, Tissue Factor (CD142 aka F3), AXL Receptor Tyrosine Kinase (AXL), Endothelin Receptor Type B (EDNRB aka ETBR), Cadherin 6 (CDH6), Fibroblast Growth Factor Receptor 3 (FGFR3), Carbonic Anhydrase 6 (CA6), CanAg glycoform of MUC1, Integrin Subunit Alpha V (ITGAV), Teratocarcinoma-Derived Growth Factor 1 (TDGF1, aka Crypto 1), SLAM Family Member 6 (SLAMF6 aka CD352), and Notch Receptor 3 (NOTCH3).

[0189] Therapeutic monoclonal antibodies from which the AF2 can be derived for incorporation into any of the polypeptide embodiments of the subject compositions described herein are known in the art. Such therapeutic antibodies can include, but are not limited to, rituximab, IDEC/Genentech/Roche (see, e.g., U.S. Pat. No. 5,736,137), a chimeric anti-CD20 antibody used in the treatment of many lymphomas, leukemias, and some autoimmune disorders; ofatumumab, an anti-CD20 antibody approved for use for chronic lymphocytic leukemia, and under development for follicular non-Hodgkin's lymphoma, diffuse large B cell lymphoma, rheumatoid arthritis and relapsing remitting multiple sclerosis; lucatumumab (HCD122), an anti-CD40 antibody for Non-Hodgkin's or Hodgkin's Lymphoma (see, for example, U.S. Pat. No. 6,899,879), AME-133, an antibody which binds to cells expressing CD20 to treat non-Hodgkin's lymphoma, veltuzumab (hA20), an antibody which binds to cells expressing CD20 to treat immune thrombocytopenic purpura, HumaLYM developed for the treatment of low-grade B-cell lymphoma, and ocrelizumab, which is an anti-CD20 monoclonal antibody for treatment of rheumatoid arthritis (see, e.g., U.S. Patent Application 20090155257), trastuzumab (see, e.g., U.S. Pat. No. 5,677,171), a humanized anti-HER2/neu antibody approved to treat breast cancer; pertuzumab, an anti-HER2 dimerization inhibitor antibody developed for use in treatment of in prostate, breast, and ovarian cancers; (see, e.g., U.S. Pat. No. 4,753,894); cetuximab, an anti-EGFR antibody used to treat epidermal growth factor receptor (EGFR)-expressing, KRAS wild-type metastatic colorectal cancer and head and neck cancer (see U.S. Pat. No. 4,943,533; PCT WO 96/40210); panitumumab, a fully human monoclonal antibody specific to the epidermal growth factor receptor (also known as EGF receptor, EGFR, ErbB-1 and HER1, currently marketed for treatment of metastatic colorectal cancer (see U.S. Pat. No. 6,235,883); zalutumumab, a fully human IgG1 monoclonal antibody that is directed towards the epidermal growth factor receptor (EGFR) for the treatment of squamous cell carcinoma of the head and neck (see, e.g., U.S. Pat. No. 7,247,301); nimotuzumab, a chimeric antibody to EGFR developed for the treatment of squamous cell carcinomas of the head and neck, nasopharyngeal cancer and glioma (see, e.g., U.S. Pat. No. 5,891,996; U.S. Pat. No. 6,506,883); matuzumab, a humanized monoclonal that is directed towards the epidermal growth factor receptor (EGFR) that was developed for the treatment of colorectal, lung, esophageal and stomach cancer (see, e.g., U.S. Patent Application 20090175858A1); cetuximab, a chimeric (mouse/human) monoclonal antibody that is directed to epidermal growth factor receptor (EGFR) used for the treatment of metastatic colorectal cancer, metastatic non-small cell lung cancer and head and neck cancer (see, e.g., U.S. Pat. No. 6,217,866); alemtuzumab, a humanized monoclonal antibody to CD52 marketed for the treatment of chronic lymphocytic leukemia (CLL), cutaneous T-cell lymphoma (CTCL) and T-cell lymphoma; ibritumomab tiuxetan, an anti-CD20 monoclonal antibody developed for treatment for some forms of B cell non-Hodgkin's lymphoma; gemtuzumab ozogamicin, an anti-CD33 (p67 protein) antibody linked to a cytotoxic chelator tiuxetan, to which a radioactive isotope is attached, used to treat acute myelogenous leukemia; ABX-CBL, an anti-CD147 antibody; ABX-IL8, an anti-IL8 antibody, ABX-MA1, an anti-MUC18 antibody, Pemtumomab (R1549, 90Y-muHMFG1), an anti-MUC1 in development, Therex (R1550), an anti-MUC1 antibody, AngioMab (AS1405), developed by Antisoma, HuBC-1, developed by Antisoma, Thioplatin (AS1407) developed by Antisoma, ANTEGREN (natalizumab), an anti-alpha-4-beta-1 (VLA4) and alpha-4-beta-7 antibody, VLA-1 mAb, an anti-VLA-1 integrin antibody, LTBR mAb, an anti-lymphotoxin beta receptor (LTBR) antibody, CAT-152, an anti-TGF-02 antibody, J695, an anti-IL-12 antibody, CAT-192, an anti-TGFβ1 antibody developed, CAT-213, an anti-Eotaxin1 antibody developed, LYMPHOSTAT-B, an anti-Blys antibody, TRAIL-R1mAb, an anti-TRAIL-R1 antibody; Herceptin, an anti-HER receptor family antibody; Anti-Tissue Factor (ATF), an anti-Tissue Factor antibody; Xolair (Omalizumab), an anti-IgE antibody, MLN-02 Antibody (formerly LDP-02); HuMax CD4®, an anti-CD4 antibody; tocilizuma, and anti-IL6R antibody; HuMax-IL15, an anti-IL15 antibody, HuMax-Inflam; HuMax-Cancer, an anti-Heparanase I antibody; HuMax-Lymphoma, HuMax-TAC; IDEC-131, an anti-CD40; IDEC-151 (Clenoliximab), an anti-CD4 antibody; IDEC-114, an anti-CD80 antibody; IDEC-152, an anti-CD23; an anti-KDR antibody, DC101, an anti-flk-1 antibody; anti-VE cadherin antibodies developed by Imclone; CEA-CIDE (labetuzumab), an anti-carcinoembryonic antigen (CEA) antibody developed by Immunomedics; Yervoy (ipilimumab), an anti-CTLA4 antibody used in the treatment of melanoma; Lumphocide® (Epratuzumab), an anti-CD22 antibody, AFP-Cide, developed by Immunomedics; MyelomaCide, developed by Immunomedics; LkoCide, developed by Immunomedics; ProstaCide, developed by Immunomedics; MDX-010, an anti-CTLA4 antibody; MDX-060, an anti-CD30 antibody; MDX-070; MDX-018 developed by Medarex; OSIDEM (IDM-1), an anti-HER2 antibody; HuMax®-CD4, an anti-CD4 antibody; HuMax-IL15, an anti-IL15 antibody; anti-intercellular adhesion molecule-1 (ICAM-1) (CD54) antibodies, MOR201; tremelimumab, an anti-CTLA-4 antibody; Anti-a 5β1 Integrin, developed by Protein Design Labs; anti-IL-12, developed by Protein Design Labs; ING-1, an anti-Ep-CAM antibody developed by Xoma; and MLN01, an anti-Beta2 integrin antibody; all of the above-cited antibody references in this paragraph are expressly incorporated herein by reference. The sequences for the above antibodies can be obtained from publicly available databases, patents, or literature references. In addition, non-limiting examples of monoclonal antibodies and VH and VL sequences (and, in some cases, with indicated CDR sequences that can be incorporated into the AF2) to cancer, tumor, or target cell markers suitable for incorporation into the subject compositions of the disclosure are presented in Table 8.

[0190] In accordance with the antigen binding fragment embodiments referred to above, it may be advantageous if the binding site recognizing the target cell marker antigen has a high binding affinity in order to capture the target cells to be destroyed with high efficiency. The subject polypeptides of any of the embodiments of the disclosure have the advantage that they may be used a number of times for killing tumor cells since, in preferred embodiments, the AF2 target cell antigen binding fragment has an affinity with a K_{d} value in the range of 10⁻⁷ to 10⁻¹⁰ M, as determined in an vitro binding assay. If the affinity of a bispecific antigen binding fragment for binding a target cell marker is too high, the composition binds the expressing target cell and remains on its surface, making it unable to release and bind to another cell. In one embodiment, a polypeptide of any of the subject composition embodiments described herein comprises an AF2, wherein the AF2 specifically binds the target cell marker with a K_{d} between about 0.1 nM and about 100 nM, or about 0.5 to about 50 nM, or about 1.0 to about 10 nM, as determined in an in vitro antigen-binding assay comprising the target cell marker. In another embodiment, the AF2 specifically binds the target cell marker with a binding affinity (as determined by the K_{d} in an in vitro binding assay) of less than about 0.1 nM, or less than about 0.5 nM, or less than about 1.0 nM, or less than about 10 nM, or less than about 50 nM, or less than about 100 nM. In another embodiment, the present disclosure provides polypeptides comprising an AF2, wherein the binding affinity of the AF2 to the target cell marker is at least 10-fold greater, or at least 100-fold greater, or at least 1000-fold greater than the binding affinity of the AF1 to CD3, as measured in an in vitro antigen-binding assay. In another embodiment, the AF1 antigen binding fragment of any of the subject embodiments of the disclosure has a lower binding affinity to the CD3 antigen of at least one order, at least two orders, or at least three orders of magnitude lower compared to the greater binding affinity of the AF2 to the target cell marker antigen, as determined as K_{d} constants in an in vitro assay. It will be understood that a greater binding affinity means a lower K_{d} value; e.g., 1×10⁻⁹ M is a greater binding affinity than 1×10⁻⁸ M.

[0191] In another embodiment, the present disclosure provides polypeptides comprising an AF2, wherein the AF2 comprises CDR of a monoclonal antibody having binding affinity to the target cell marker antigen. In another embodiment, the polypeptides of any of the subject composition embodiments described herein comprise an AF2, wherein the AF2 comprises CDR derived from a monoclonal antibody having binding affinity to the target cell marker antigen wherein the CDR of the AF2 are selected from the CDRs within the VL and VH sequences of SEQ ID NOs:719-918.

[0192] In some aspects of any of the embodiments disclosed herein, a subject polypeptide comprises an AF2, wherein the AF2 comprises a VL and VH of a monoclonal antibody having binding affinity to the target cell marker antigen. In some cases, the polypeptides of any of the subject composition embodiments described herein can comprise an AF2 wherein the AF2 comprises VL and VH of a monoclonal antibody having binding affinity to the target cell marker antigen wherein the VL comprises an amino acid sequence having at least 90%, 91%, 92%, 93%, 94%, 95%, 96%, 97%, 98%, 99% sequence identity or is identical to an amino acid sequence of SEQ ID NOs:719-918, and the VH comprises an amino acid sequence having at least 90%, 91%, 92%, 93%, 94%, 95%, 96%, 97%, 98%, 99% sequence identity or is identical to an amino acid sequence of SEQ ID NOs:719-818.

[0193] It will be understood that use of the term “antigen binding fragment” for the composition embodiments disclosed herein is intended to include portions or fragments of antibodies that retain the ability to bind the antigens that are the ligands of the corresponding intact antibody. In such embodiments, the antigen binding fragment can be, but is not limited to, CDRs and intervening framework regions, variable or hypervariable regions of light and/or heavy chains of an antibody (VL, VH), variable fragments (Fv), Fab′ fragments, F(ab′)2 fragments, Fab fragments, single chain antibodies (scAb), VHH camelid antibodies, single chain variable fragment (scFv), linear antibodies, a single domain antibody, complementarity determining regions (CDR), domain antibodies (dAbs), single domain heavy chain immunoglobulins of the BHH or BNAR type, single domain light chain immunoglobulins, or other polypeptides known in the art containing a fragment of an antibody capable of binding an antigen. The VL and VH of two antigen binding fragments can also be configured in a single chain diabody configuration; i.e., the VL and VH of the AF1 and AF2 configured with linkers of an appropriate length to permit arrangement as a diabody.

[0194] In certain embodiments, the VL and VH of the antigen binding fragments are fused by relatively long linkers, consisting 25, 26, 27, 28, 29, 30, 31, 32, 33, 34, or 35 hydrophilic amino acids that, when joined together, have a flexible characteristic. In one embodiment, the VL and VH of any of the scFv embodiments described herein are linked by linkers of hydrophilic amino acids selected from the sequences GSGEGSEGEGGGEGSEGEGSGEGGEGEGSG (SEQ ID NO: 1142), TGSGEGSEGEGGGEGSEGEGSGEGGEGEGSGT (SEQ ID NO: 1143), GATPPETGAETESPGETTGGSAESEPPGEG (SEQ ID NO: 1144), or GSAAPTAGTTPSASPAPPTGGSSAAGSPST (SEQ ID NO: 1145). In other cases, the AF1 and AF2 of the subject compositions are linked together by a short linker of hydrophilic amino acids having 3, 4, 5, 6, or 7 amino acids. In one embodiment, the short linker sequences are selected from the group of sequences SGGGGS (SEQ ID NO: 1146), GGGGS (SEQ ID NO: 1147), GGSGGS (SEQ ID NO: 1148), GGS, or GSP. In another embodiment, the disclosure provides compositions comprising a single chain diabody in which after folding, the first domain (VL or VH) is paired with the last domain (VH or VL) to form one scFv and the two domains in the middle are paired to form the other scFv in which the first and second domains, as well as the third and last domains, are fused together by one of the foregoing short linkers and the second and the third variable domains are fused by one of the foregoing long linkers. The selection of the short linker and long linker may prevent the incorrect pairing of adjacent variable domains, thereby facilitating the formation of the single chain diabody configuration comprising the VL and VH of the first antigen binding fragment and the second antigen binding fragment.

TABLE 8
Target cell marker antibodies and sequences

| | | Target | | SEQ | | SEQ |
|---|---|---|---|---|---|---|
| Trade | Antibody | Cell | | ID | | ID |
| Name | Name | Marker | VH Sequence | NO: | VL Sequence | NO: |
| Tysabri™ | natalizumab | Alpha 4 | QVQLVQSGAEV | 719 | DIQMTQSPSSL | 819 |
| | | Integrin | KKPGASVKVSC | | SASVGDRVTIT | |
| | | | KASGFNIKDTY | | CKTSQDINKYM | |
| | | | IHWVRQAPGQR | | AWYQQTPGKAP | |
| | | | LEWMGRIDPAN | | RLLIHYTSALQ | |
| | | | GYTKYDPKFQG | | PGIPSRFSGSG | |
| | | | RVTITADTSAS | | SGRDYTFTISS | |
| | | | TAYMELSSLRS | | LQPEDIATYYC | |
| | | | EDTAVYYCARE | | LQYDNLWTFGQ | |
| | | | GYYGNYGVYAM | | GTKVEIK | |
| | | | DYWGQGTLVTV | | | |
| | | | SS | | | |
| REGN910 | nesvacumab | Ang2 | EVQLVESGGGL | 720 | EIVLTQSPGTL | 820 |
| | | | VQPGGSLRLSC | | SLSPGERATLS | |
| | | | AASGFTFSSYD | | CRASQSVSSTY | |
| | | | IHWVRQATGKG | | LAWYQQKPGQA | |
| | | | LEWVSAIGPAG | | PRLLIYGASSR | |
| | | | DTYYPGSVKGR | | ATGIPDRFSGS | |
| | | | FTISRENAKNS | | GSGTDFTLTIS | |
| | | | LYLQMNSLRAG | | RLEPEDFAVYY | |
| | | | DTAVYYCARGL | | CQHYDNSQTFG | |
| | | | ITFGGLIAPFD | | QGTKVEIK | |
| | | | YWGQGTLVTVS | | | |
| | | | S | | | |
| hMFE23 | | CEA | QVKLEQSGAEV | 721 | ENVLTQSPSSM | 821 |
| | | | VKPGASVKLSC | | SASVGDRVNIA | |
| | | | KASGFNIKDSY | | CSASSSVSYMH | |
| | | | MHWLRQGPGQR | | WFQQKPGKSPK | |
| | | | LEWIGWIDPEN | | LWIYSTSNLAS | |
| | | | GDTEYAPKFQG | | GVPSRFSGSGS | |
| | | | KATFTTDTSAN | | GTDYSLTISSM | |
| | | | TAYLGLSSLRP | | QPEDAATYYCQ | |
| | | | EDTAVYYCNEG | | QRSSYPLTFGG | |
| | | | TPTGPYYFDYW | | GTKLEIK | |
| | | | GQGTLVTVSS | | | |
| M5A | | CEA | EVQLVESGGGL | 722 | DIQLTQSPSSL | 822 |
| (humanized | | | VQPGGSLRLSC | | SASVGDRVTIT | |
| T84.66) | | | AASGFNIKDTY | | CRAGESVDIFG | |
| | | | MHWVRQAPGKG | | VGFLHWYQQKP | |
| | | | LEWVARIDPAN | | GKAPKLLIYRA | |
| | | | GNSKYADSVKG | | SNLESGVPSRF | |
| | | | RFTISADTSKN | | SGSGSRTDFTL | |
| | | | TAYLQMNSLRA | | TISSLQPEDFA | |
| | | | EDTAVYYCAPF | | TYYCQQTNEDP | |
| | | | GYYVSDYAMAY | | YTFGQGTKVEI | |
| | | | WGQGTLVTVSS | | K | |
| M5B | | CEA | EVQLVESGGGL | 723 | DIQLTQSPSSL | 823 |
| (humanized | | | VQPGGSLRLSC | | SASVGDRVTIT | |
| T84.66) | | | AASGFNIKDTY | | CRAGESVDIFG | |
| | | | MHWVRQAPGKG | | VGFLHWYQQKP | |
| | | | LEWVARIDPAN | | GKAPKLLIYRA | |
| | | | GNSKYVPKFQG | | SNLESGVPSRF | |
| | | | RATISADTSKN | | SGSGSRTDFTL | |
| | | | TAYLQMNSLRA | | TISSLQPEDFA | |
| | | | EDTAVYYCAPF | | TYYCQQTNEDP | |
| | | | GYYVSDYAMAY | | YTFGQGTKVEI | |
| | | | WGQGTLVTVSS | | K | |
| CEA-Cide | Labetuzumab | CEACAM5 | EVQLVESGGGV | 724 | DIQLTQSPSSL | 824 |
| | (MN-14) | | VQPGRSLRLSC | | SASVGDRVTIT | |
| | | | SASGFDFTTYW | | CKASQDVGTSV | |
| | | | MSWVRQAPGKG | | AWYQQKPGKAP | |
| | | | LEWIGEIHPDS | | KLLIYWTSTRH | |
| | | | STINYAPSLKD | | TGVPSRFSGSG | |
| | | | RFTISRDNAKN | | SGTDFTFTISS | |
| | | | TLFLQMDSLRP | | LQPEDIATYYC | |
| | | | EDTGVYFCASL | | QQYSLYRSFGQ | |
| | | | YFGFPWFAYWG | | GTKVEIK | |
| | | | QGTPVTVSS | | | |
| CEA-Scan | arcitumomab | CEACAM5 | EVKLVESGGGL | 725 | QTVLSQSPAIL | 825 |
| | | | VQPGGSLRLSC | | SASPGEKVTMT | |
| | | | ATSGFTFTDYY | | CRASSSVTYIH | |
| | | | MNWVRQPPGKA | | WYQQKPGSSPK | |
| | | | LEWLGFIGNKA | | SWIYATSNLAS | |
| | | | NGYTTEYSASV | | GVPARFSGSGS | |
| | | | KGRFTISRDKS | | GTSYSLTISRV | |
| | | | QSILYLQMNTL | | EAEDAATYYCQ | |
| | | | RAEDSATYYCT | | HWSSKPPTFGG | |
| | | | RDRGLRFYFDY | | GTKLEIKR | |
| | | | WGQGTTLTVSS | | | |
| MT110 | | CEACAM5 | EVQLVESGGGL | 726 | QAVLTQPASLS | 826 |
| | | | VQPGRSLRLSC | | ASPGASASLTC | |
| | | | AASGFTVSSYW | | TLRRGINVGAY | |
| | | | MHWVRQAPGKG | | SIYWYQQKPGS | |
| | | | LEWVGFIRNKA | | PPQYLLRYKSD | |
| | | | NGGTTEYAASV | | SDKQQGSGVSS | |
| | | | KGRFTISRDDS | | RFSASKDASAN | |
| | | | KNTLYLQMNSL | | AGILLISGLQS | |
| | | | RAEDTAVYYCA | | EDEADYYCMIW | |
| | | | RDRGLRFYFDY | | HSGASAVFGGG | |
| | | | WGQGTTVTVSS | | TKLTVL | |
| MT103 | blinatumomab | CD19 | QVQLQQSGAEL | 727 | DIQLTQSPASL | 827 |
| | | | VRPGSSVKISC | | AVSLGQRATIS | |
| | | | KASGYAFSSYW | | CKASQSVDYDG | |
| | | | MNWVKQRPGQG | | DSYLNWYQQIP | |
| | | | LEWIGQIWPGD | | GQPPKLLIYDA | |
| | | | GDTNYNGKFKG | | SNLVSGIPPRF | |
| | | | KATLTADESSS | | SGSGSGTDFTL | |
| | | | TAYMQLSSLAS | | NIHPVEKVDAA | |
| | | | EDSAVYFCARR | | TYHCQQSTEDP | |
| | | | ETTTVGRYYYA | | WTFGGGTKLEI | |
| | | | MDYWGQGTTVT | | K | |
| | | | VSS | | | |
| Arzerra | ofatummnab | CD20 | EVQLVESGGGL | 728 | EIVLTQSPATL | 828 |
| | | | VQPGRSLRLSC | | SLSPGERATLS | |
| | | | AASGFTFNDYA | | CRASQSVSSYL | |
| | | | MHWVRQAPGKG | | AWYQQKPGQAP | |
| | | | LEWVSTISWNS | | RLLIYDASNRA | |
| | | | GSIGYADSVKG | | TGIPARFSGSG | |
| | | | RFTISRDNAKK | | SGTDFTLTISS | |
| | | | SLYLQMNSLRA | | LEPEDFAVYYC | |
| | | | EDTALYYCAKD | | QQRSNWPITFG | |
| | | | IQYGNYYYGMD | | QGTRLEIK | |
| | | | VWGQGTTVTVS | | | |
| | | | S | | | |
| Bexxar™ | tositumomab | CD20 | QAYLQQSGAEL | 729 | QIVLSQSPAIL | 829 |
| | | | VRPGASVKMSC | | SASPGEKVTMT | |
| | | | KASGYTFTSYN | | CRASSSVSYMH | |
| | | | MHWVKQTPRQG | | WYQQKPGSSPK | |
| | | | LEWIGAIYPGN | | PWIYAPSNLAS | |
| | | | GDTSYNQKFKG | | GVPARFSGSGS | |
| | | | KATLTVDKSSS | | GTSYSLTISRV | |
| | | | TAYMQLSSLTS | | EAEDAATYYCQ | |
| | | | EDSAVYFCARV | | QWSFNPPTFGA | |
| | | | VYYSNSYWYFD | | GTKLELK | |
| | | | VWGTGTTVTVS | | | |
| | | | G | | | |
| GAZYVA | Obinutuzumab | CD20 | QVQLVQSGAEV | 730 | DIVMTQTPLSL | 830 |
| | | | KKPGSSVKVSC | | PVTPGEPASIS | |
| | | | KASGYAFSYSW | | CRSSKSLLHSN | |
| | | | INWVRQAPGQG | | GITYLYWYLQK | |
| | | | LEWMGRIFPGD | | PGQSPQLLIYQ | |
| | | | GDTDYNGKFKG | | MSNLVSGVPDR | |
| | | | RVTITADKSTS | | FSGSGSGTDFT | |
| | | | TAYMELSSLRS | | LKISRVEAEDV | |
| | | | EDTAVYYCARN | | GVYYCAQNLEL | |
| | | | VFDGYWLVYWG | | PYTFGGGTKVE | |
| | | | QGTLVTVSS | | IK | |
| | Ocrelizumab/ | CD20 | EVQLVESGGGL | 731 | DIQMTQSPSSL | 831 |
| | 2H7 v16 | | VQPGGSLRLSC | | SASVGDRVTIT | |
| | | | AASGYTFTSYN | | CRASSSVSYMH | |
| | | | MHWVRQAPGKG | | WYQQKPGKAPK | |
| | | | LEWVGAIYPGN | | PLIYAPSNLAS | |
| | | | GDTSYNQKFKG | | GVPSRFSGSGS | |
| | | | RFTISVDKSKN | | GTDFTLTISSL | |
| | | | TLYLQMNSLRA | | QPEDFATYYCQ | |
| | | | EDTAVYYCARV | | QWSFNPPTFGQ | |
| | | | VYYSNSYWYFD | | GTKVEIK | |
| | | | VWGQGTLVTVS | | | |
| | | | S | | | |
| Rituxan™ | rituximab | CD20 | QVQLQQPGAEL | 732 | QIVLSQSPAIL | 832 |
| | | | VKPGASVKMSC | | SASPGEKVTMT | |
| | | | KASGYTFTSYN | | CRASSSVSYIH | |
| | | | MHWVKQTPGRG | | WFQQKPGSSPK | |
| | | | LEWIGAIYPGN | | PWIYATSNLAS | |
| | | | GDTSYNQKFKG | | GVPVRFSGSGS | |
| | | | KATLTADKSSS | | GTSYSLTISRV | |
| | | | TAYMQLSSLTS | | EAEDAATYYCQ | |
| | | | EDSAVYYCARS | | QWTSNPPTFGG | |
| | | | TYYGGDWYFNV | | GTKLEIK | |
| | | | WGAGTTVTVSA | | | |
| Zevalin™ | ibritumomab | CD20 | QAYLQQSGAEL | 733 | QIVLSQSPAIL | 833 |
| | tieuxetan | | VRPGASVKMSC | | SASPGEKVTMT | |
| | | | KASGYTFTSYN | | CRASSSVSYMH | |
| | | | MHWVKQTPRQG | | WYQQKPGSSPK | |
| | | | LEWIGAIYPGN | | PWIYAPSNLAS | |
| | | | GDTSYNQKFKG | | GVPARFSGSGS | |
| | | | KATLTVDKSSS | | GTSYSLTISRV | |
| | | | TAYMQLSSLTS | | EAEDAATYYCQ | |
| | | | EDSAVYFCARV | | QWSFNPPTFGA | |
| | | | VYYSNSYWYFD | | GTKLELK | |
| | | | VWGTGTTVTVS | | | |
| | | | A | | | |
| Mylotarg | Gemtuzumab | CD33 | QLVQSGAEVKK | 734 | DIQLTQSPSTL | 834 |
| | (hP67.6) | | PGSSVKVSCKA | | SASVGDRVTIT | |
| | | | SGYTITDSNIH | | CRASESLDNYG | |
| | | | WVRQAPGQSLE | | IRFLTWFQQKP | |
| | | | WIGYIYPYNGG | | GKAPKLLMYAA | |
| | | | TDYNQKFKNRA | | SNQGSGVPSRF | |
| | | | TLTVDNPTNTA | | SGSGSGTEFTL | |
| | | | YMELSSLRSED | | TISSLQPDDFA | |
| | | | TDFYYCVNGNP | | TYYCQQTKEVP | |
| | | | WLAYWGQGTLV | | WSFGQGTKVEV | |
| | | | TVSS | | K | |
| Daratuniumab | | CD38 | EVQLLESGGGL | 735 | EIVLTQSPATL | 835 |
| | | | VQPGGSLRLSC | | SLSPGERATLS | |
| | | | AVSGFTFNSFA | | CRASQSVSSYL | |
| | | | MSWVRQAPGKG | | AWYQQKPGQAP | |
| | | | LEWVSAISGSG | | RLLIYDASNRA | |
| | | | GGTYYADSVKG | | TGIPARFSGSG | |
| | | | RFTISRDNSKN | | SGTDFTLTISS | |
| | | | TLYLQMNSLRA | | LEPEDFAVYYC | |
| | | | EDTAVYFCAKD | | QQRSNWPPTFG | |
| | | | KILWFGEPVFD | | QGTKVEIK | |
| | | | YWGQGTLVTVS | | | |
| | | | S | | | |
| | 1F6 | CD70 | QIQLVQSGPEV | 736 | DIVLTQSPASL | 836 |
| | | | KKPGETVKISC | | AVSLGQRATIS | |
| | | | KASGYTFTNYG | | CRASKSVSTSG | |
| | | | MNWVKQAPGKG | | YSFMHWYQQKP | |
| | | | LKWMGWINTYT | | GQPPKLLIYLA | |
| | | | GEPTYADAFKG | | SNLESGVPARF | |
| | | | RFAFSLETSAS | | SGSGSGTDFTL | |
| | | | TAYLQINNLKN | | NIHPVEEEDAA | |
| | | | EDTATYFCARD | | TY | |
| | | | YGDYGMDYWGQ | | YCQHSREVPWT | |
| | | | GTSVTVSS | | FGGGTKLEIK | |
| | 2F2 | CD70 | QVQLQQSGTEL | 737 | DIVLTQSPASL | 837 |
| | | | MTPGASVTMSC | | TVSLGQKTTIS | |
| | | | KTSGYTFSTYW | | CRASKSVSTSG | |
| | | | IEWVKQRPGHG | | YSFMHWYQLKP | |
| | | | LEWIGEILGPS | | GQSPKLLIYLA | |
| | | | GYTDYNEKFKA | | SDLPSGVPARF | |
| | | | KATFTADTSSN | | SGSGSGTDFTL | |
| | | | TAYMQLSSLAS | | KIHPVEEEDAA | |
| | | | EDSAVYYCARW | | TY | |
| | | | DRLYAHDYWGG | | YCQHSREIPYT | |
| | | | GTSVTVSS | | FGGGTKLEIT | |
| | 2H5 | CD70 | QVQLVESGGGV | 738 | EIVLTQSPATL | 838 |
| | | | VQPGRSLRLSC | | SLSPGERATLS | |
| | | | AASGFTFSSYI | | CRASQSVSSYL | |
| | | | MHWVRQAPGKG | | AWYQQKPGQAP | |
| | | | LEWVAVISYDG | | RLLIYDASNRA | |
| | | | RNKYYADSVKG | | TGIPARFSGSG | |
| | | | RFTISRDNSKN | | SGTDFTLTISS | |
| | | | TLYLQMNSLRA | | LEPEDFAVYYC | |
| | | | ED | | QQ | |
| | | | TAVYYCARDTD | | RTNWPLTFGGG | |
| | | | GYDFDYWGQGT | | TKVEIK | |
| | | | LVTVSS | | | |
| | 10B4 | CD70 | QIQLVESGGGV | 739 | AIQLTQSPSSL | 839 |
| | | | VQPGRSLRLSC | | SASVGDRVTIT | |
| | | | AASGFTFGYYA | | CRASQGISSAL | |
| | | | MHWVRQAPGKG | | AWYQQKPGKAP | |
| | | | LEWVAVISYDG | | KFLIYDASSLE | |
| | | | SIKYYADSVKG | | SGVPSRFSGSG | |
| | | | RFTISRDNSKN | | SGTDFTLTISS | |
| | | | TLYLQMNSLRA | | LQPEDFATYYC | |
| | | | ED | | QQ | |
| | | | TAVYYCAREGP | | FNSYPFTFGPG | |
| | | | YSNYLDYWGQG | | TKVDIK | |
| | | | TLVTVSS | | | |
| | 8B5 | CD70 | QVQLVESGGGV | 740 | DIQMTQSPSSL | 840 |
| | | | VQPGRSLRLSC | | SASVGDRVTIT | |
| | | | ATSGFTFSDYG | | CRASQGISSWL | |
| | | | MHWVRQAPGKG | | AWYQQKPEKAP | |
| | | | LEWVAVIWYDG | | KSLIYAASSLQ | |
| | | | SNKYYADSVKG | | SGVPSRFSGSG | |
| | | | RFTISRDNSKK | | SGTDFTLTISS | |
| | | | TLSLQMNSLRA | | LQPEDFATYYC | |
| | | | ED | | QQ | |
| | | | TAVYYCARDSI | | YNSYPLTFGGG | |
| | | | MVRGDYWGQGT | | TKVEIK | |
| | | | LVTVSS | | | |
| | 18E7 | CD70 | QVQLVESGGGV | 741 | DIQMTQSPSSL | 841 |
| | | | VQPGRSLRLSC | | SASVGDRVTIT | |
| | | | AASGFTFSDHG | | CRASQGISSWL | |
| | | | MHWVRQAPGKG | | AWYQQKPEKAP | |
| | | | LEWVAVIWYDG | | KSLIYAASSLQ | |
| | | | SNKYYADSVKG | | SGVPSRFSGSG | |
| | | | RFTISRDNSKN | | SGTDFTLTISS | |
| | | | TLYLQMNSLRA | | LQPEDFATYYC | |
| | | | ED | | QQ | |
| | | | TAVYYCARDSI | | YNSYPLTFGGG | |
| | | | MVRGDYWGQGT | | TKVEIK | |
| | | | LVTVSS | | | |
| | 69A7 | CD70 | QVQLQESGPGL | 742 | EIVLTQSPATL | 842 |
| | | | VKPSETLSLTC | | SLSPGERATLS | |
| | | | TVSGGSVSSDY | | CRASQSVSSYL | |
| | | | YYWSWIRQPPG | | AWYQQKPGQAP | |
| | | | KGLEWLGYIYY | | RLLIFDASNRA | |
| | | | SGSTNYNPSLK | | TGIPARFSGSG | |
| | | | SRVTISVDTSK | | SGTDFTLTISS | |
| | | | NQFSLKLRSVT | | LEPEDFAVYYC | |
| | | | TA | | QQ | |
| | | | DTAVYYCARGD | | RSNWPLTFGGG | |
| | | | GDYGGNCFDYW | | TKVEIK | |
| | | | GQGTLVTVSS | | | |
| CE-355621 | | cMET | QVQLVQSGAEV | 743 | DIQMTQSPSSV | 843 |
| | | | KKPGASVKVSC | | SASVGDRVTIT | |
| | | | KASGYTFTSYG | | CRASQGINTWL | |
| | | | FSWVRQAPGQG | | AWYQQKPGKAP | |
| | | | LEWMGWISASN | | KLLIYAASSLK | |
| | | | GNTYYAQKLQG | | SGVPSRFSGSG | |
| | | | RVTMTTDTSTS | | SGTDFTLTISS | |
| | | | TAYMELRSLRS | | LQPEDFATYYC | |
| | | | DDTAVYYCARV | | QQANSFPLTFG | |
| | | | YADYADYNGQG | | GGTKVEIK | |
| | | | TLVTVSS | | | |
| LY2875358 | emibetuzumab | cMET | QVQLVQSGAEV | 744 | DIQMTQSPSSL | 844 |
| | | | KKPGASVKVSC | | SASVGDRVTIT | |
| | | | KASGYTFTDYY | | CSVSSSVSSIY | |
| | | | MHWVRQAPGQG | | LHWYQQKPGKA | |
| | | | LEWMGRVNPNR | | PKLLIYSTSNL | |
| | | | RGTTYNQKFEG | | ASGVPSRFSGS | |
| | | | RVTMTTDTSTS | | GSGTDFTLTIS | |
| | | | TAYMELRSLRS | | SLQPEDFATYY | |
| | | | DDTAVYYCARA | | CQVYSGYPLTF | |
| | | | NWLDYWGQGTT | | GGGTKVEIK | |
| | | | VTVSS | | | |
| MetMAb | onartuzumab | cMET | EVQLVESGGGL | 745 | DIQMTQSPSSL | 845 |
| | | | VQPGGSLRLSC | | SASVGDRVTIT | |
| | | | AASGYTFTSYW | | CKSSQSLLYTS | |
| | | | LHWVRQAPGKG | | SQKNYLAWYQQ | |
| | | | LEWVGMIDPSN | | KPGKAPKLLIY | |
| | | | SDTRFNPNFKD | | WASTRESGVPS | |
| | | | RFTISADTSKN | | RFSGSGSGTDF | |
| | | | TAYLQMNSLRA | | TLTISSLQPED | |
| | | | EDTAVYYCATY | | FATYYCQQYYA | |
| | | | RSYVTPLDYWG | | YPWTFGQGTKV | |
| | | | QGTLVTVSS | | EIK | |
| | tremelimumab | CTLA4 | QVQLVESGGGV | 746 | DIQMTQSPSSL | 846 |
| | (CP-675206, | | VQPGRSLRLSC | | SASVGDRVTIT | |
| | or 11.2.1) | | AASGFTFSSYG | | CRASQSINSYL | |
| | | | MHWVRQAPGKG | | DWYQQKPGKAP | |
| | | | LEWVAVIWYDG | | KLLIYAASSLQ | |
| | | | SNKYYADSVKG | | SGVPSRFSGSG | |
| | | | RFTISRDNSKN | | SGTDFTLTISS | |
| | | | TLYLQMNSLRA | | LQPEDFATYYC | |
| | | | EDTAVYYCARD | | QQYYSTPFTFG | |
| | | | PRGATLYYYYY | | PGTKVEIK | |
| | | | GMDVKGQGTTV | | | |
| | | | TVSS | | | |
| Yervoy | Ipilimumab | CTLA4 | QVQLVESGGGV | 747 | EIVLTQSPGTL | 847 |
| | 10D1 | | VQPGRSLRLSC | | SLSPGERATLS | |
| | | | AASGFTFSSYT | | CRASQSVGSSY | |
| | | | MHWVRQAPGKG | | LAWYQQKPGQA | |
| | | | LEWVTFISYDG | | PRLLIYGAFSR | |
| | | | NNKYYADSVKG | | ATGIPDRFSGS | |
| | | | RFTISRDNSKN | | GSGTDFTLTIS | |
| | | | TLYLQMNSLRA | | RLEPEDFAVYY | |
| | | | EDTAIYYCART | | CQQYGSSPWTF | |
| | | | GWLGPFDYWGQ | | GQGTKVEIK | |
| | | | GTLVTVSS | | | |
| AGS16F | H16-7.8 | ENPP3 | QVQLQESGPGL | 748 | EIVLTQSPDFQ | 848 |
| | | | VKPSQTLSLTC | | SVTPKEKVTIT | |
| | | | TVSGGSISSGG | | CRASQSIGISL | |
| | | | YYWSWIRQHPG | | HWYQQKPDQSP | |
| | | | KGLEWIGIIYY | | KLLIKYASQSF | |
| | | | SGSTYYNPSLK | | SGVPSRFSGSG | |
| | | | SRVTISVDTSK | | SGTDFTLTINS | |
| | | | NQFSLKLNSVT | | LEAEDAATYYC | |
| | | | AADTAVFYCAR | | HQSRSFPWTFG | |
| | | | VAIVTTIPGGM | | QGTKVEIK | |
| | | | DVWGQGTTVTV | | | |
| | | | SS | | | |
| MT110 | solitomab | EpCAM | EVQLLEQSGAE | 749 | ELVMTQSPSSL | 849 |
| | | | LVRPGTSVKIS | | TVTAGEKVTMS | |
| | | | CKASGYAFTNY | | CKSSQSLLNSG | |
| | | | WLGWVKQRPGH | | NQKNYLTWYQQ | |
| | | | GLEWIGDIFPG | | KPGQPPKLLIY | |
| | | | SGNIHYNEKFK | | WASTRESGVPD | |
| | | | GKATLTADKSS | | RFTGSGSGTDF | |
| | | | STAYMQLSSLT | | TLTISSVQAED | |
| | | | FEDSAVYFCAR | | LAVYYCQNDYS | |
| | | | LRNWDEPMDYW | | YPLTFGAGTKL | |
| | | | GQGTTVTVSS | | EIK | |
| MT201 | Adecatumumab | EpCAM | EVQLLESGGGV | 750 | ELQMTQSPSSL | 850 |
| | | | VQPGRSLRLSC | | SASVGDRVTIT | |
| | | | AASGFTFSSYG | | CRTSQSISSYL | |
| | | | MHWVRQAPGKG | | NWYQQKPGQPP | |
| | | | LEWVAVISYDG | | KLLIYWASTRE | |
| | | | SNKYYADSVKG | | SGVPDRFSGSG | |
| | | | RFTISRDNSKN | | SGTDFTLTISS | |
| | | | TLYLQMNSLRA | | LQPEDSATYYC | |
| | | | EDTAVYYCAKD | | QQSYDIPYTFG | |
| | | | MGWGSGWRPYY | | QGTKLEIK | |
| | | | YYGMDVWGQGT | | | |
| | | | TVTVSS | | | |
| Panorex | Edrecolomab | EpCAM | QVQLQQSGAEL | 751 | NIVMTQSPKSM | 851 |
| | Mab CO17-1A | | VRPGTSVKVSC | | SMSVGERVTLT | |
| | | | KASGYAFTNYL | | CKASENVVTYV | |
| | | | IEWVKQRPGQG | | SWYQQKPEQSP | |
| | | | LEWIGVINPGS | | KLLIYGASNRY | |
| | | | GGTNYNEKFKG | | TGVPDRFTGSG | |
| | | | KATLTADKSSS | | SATDFTLTISS | |
| | | | TAYMQLSSLTS | | VQAEDLADYHC | |
| | | | DDSAVYFCARD | | GQGYSYPYTFG | |
| | | | GPWFAYWGQGT | | GGTKLEIK | |
| | | | LVTVSA | | | |
| | tucotuzumab | EpCAM | QIQLVQSGPEL | 752 | QILLTQSPAIM | 852 |
| | | | KKPGETVKISC | | SASPGEKVTMT | |
| | | | KASGYTFTNYG | | CSASSSVSYML | |
| | | | MNWVRQAPGKG | | WYQQKPGSSPK | |
| | | | LKWMGWINTYT | | PWIFDTSNLAS | |
| | | | GEPTYADDFKG | | GFPARFSGSGS | |
| | | | RFVFSLETSAS | | GTSYSLIISSM | |
| | | | TAFLQLNNLRS | | EAEDAATYYCH | |
| | | | EDTATYFCVRF | | QRSGYPYTFGG | |
| | | | ISKGDYWGQGT | | GTKLEIK | |
| | | | SVTVSS | | | |
| UBS-54 | | EpCAM | VQLQQSDAELV | 753 | DIVMTQSPDSL | 853 |
| | | | KPGASVKISCK | | AVSLGERATIN | |
| | | | ASGYTFTDHAI | | CKSSQSVLYSS | |
| | | | HWVKQNPEQGL | | NNKNYLAWYQQ | |
| | | | EWIGYFSPGND | | KPGQPPKLLIY | |
| | | | DFKYNERFKGK | | WASTRESGVPD | |
| | | | ATLTADKSSST | | RFSGSGSGTDF | |
| | | | AYVQLNSLTSE | | TLTISSLQAED | |
| | | | DSAVYFCTRSL | | VAVYYCQQYYS | |
| | | | NMAYWGQGTSV | | YPLTFGGGTKV | |
| | | | TVSS | | KES | |
| 3622W94 | 323/A3 | EpCAM | EVQLVQSGPEV | 754 | DIVMTQSPLSL | 854 |
| | | | KKPGASVKVSC | | PVTPGEPASIS | |
| | | | KASGYTFTNYG | | CRSSINKKGSN | |
| | | | MNWVRQAPGQG | | GITYLYWYLQK | |
| | | | LEWMGWINTYT | | PGQSPQLLIYQ | |
| | | | GEPTYGEDFKG | | MSNLASGVPDR | |
| | | | RFAFSLDTSAS | | FSGSGSGTDFT | |
| | | | TAYMELSSLRS | | LKISRVEAEDV | |
| | | | EDTAVYFCARF | | GVYYCAQNLEI | |
| | | | GNYVDYWGQGS | | PRTFGQGTKVE | |
| | | | LVTVSS | | IK | |
| 4D5MOCBv2 | | EpCAM | EVQLVQSGPGL | 755 | DIQMTQSPSSL | 855 |
| | | | VQPGGSVRISC | | SASVGDRVTIT | |
| | | | AASGYTFTNYG | | CRSTKSLLHSN | |
| | | | MNWVKQAPGKG | | GITYLYWYQQK | |
| | | | LEWMGWINTYT | | PGKAPKLLIYQ | |
| | | | GESTYADSFKG | | MSNLASGVPSR | |
| | | | RFTFSLDTSAS | | FSSSGSGTDFT | |
| | | | AAYLQINSLRA | | LTISSLQPEDF | |
| | | | EDTAVYYCARF | | ATYYCAQNLEI | |
| | | | AIKGDYWGQGT | | PRTFGQGTKVE | |
| | | | LLTVSS | | IK | |
| 4D5MOCB | | EpCAM | EVQLVQSGPGL | 756 | DIQMTQSPSSL | 856 |
| | | | VQPGGSVRISC | | SASVGDRVTIT | |
| | | | AASGYTFTNYG | | CRSTKSLLHSN | |
| | | | MNWVKQAPGKG | | GITYLYWYQQK | |
| | | | LEWMGWINTYT | | PGKAPKLLIYg | |
| | | | GESTYADSFKG | | MSNLASGVPSR | |
| | | | RFTFSLDTSAS | | FSSSGSGTDFT | |
| | | | AAYLQINSLRA | | LTISSLQPEDF | |
| | | | EDTAVYYCARF | | ATYYCAQNLEI | |
| | | | AIKGDYWGQGT | | PRTFGQGTKVE | |
| | | | LLTVSS | | LK | |
| MEDI-547 | 1C1 | EphA2 | EVQLLESGGGL | 757 | DIQMTQSPSSL | 857 |
| | | | VQPGGSLRLSC | | SASVGDRVTIT | |
| | | | AASGFTFSHYM | | CRASQSISTWL | |
| | | | MAWVRQAPGKG | | AWYQQKPGKAP | |
| | | | LEWVSRIGPSG | | KLLIYKASNLH | |
| | | | GPTHYADSVKG | | TGVPSRFSGSG | |
| | | | RFTISRDNSKN | | SGTEFSLTISG | |
| | | | TLYLQMNSLRA | | LQPDDFATYYC | |
| | | | EDTAVYYCAGY | | QQYNSYSRTFG | |
| | | | DSGYDYVAVAG | | QGTKVEIK | |
| | | | PAEYFQHWGQG | | | |
| | | | TLVTVSS | | | |
| MORAb-003 | farletuzumab | FOLR1 | EVQLVESGGGV | 758 | DIQLTQSPSSL | 858 |
| | | | VQPGRSLRLSC | | SASVGDRVTIT | |
| | | | SASGFTFSGYG | | CSVSSSISSNN | |
| | | | LSWVRQAPGKG | | LHWYQQKPGKA | |
| | | | LEWVAMISSGG | | PKPWIYGTSNL | |
| | | | SYTYYADSVKG | | ASGVPSRFSGS | |
| | | | RFAISRDNAKN | | GSGTDYTFTIS | |
| | | | TLFLQMDSLRP | | SLQPEDIATYY | |
| | | | EDTGVYFCARH | | CQQWSSYPYMY | |
| | | | GDDPAWFAYWG | | TFGQGTKVEIK | |
| | | | QGTPVTVSS | | | |
| M9346A | huMOV19 | FOLR1 | QVQLVQSGAEV | 759 | DIVLTQSPLSL | 859 |
| | (vLCv1.60) | | VKPGASVKISC | | AVSLGQPAIIS | |
| | | | KASGYTFTGYF | | CKASQSVSFAG | |
| | | | MNWVKQSPGQS | | TSLMHWYHQKP | |
| | | | LEWIGRIHPYD | | GQQPRLLIYRA | |
| | | | GDTFYNQKFQG | | SNLEAGVPDRF | |
| | | | KATLTVDKSSN | | SGSGSKTDFTL | |
| | | | TAHMELLSLTS | | NISPVEAEDAA | |
| | | | EDFAVYYCTRY | | TYYCQQSREYP | |
| | | | DGSRAMDYWGQ | | YTFGGGTKLEI | |
| | | | GTTVTVSS | | K | |
| M9346A | huMOV19 | FOLR1 | QVQLVQSGAEV | 760 | DIVLTQSPLSL | 860 |
| | (vLCv1.60) | | VKPGASVKISC | | AVSLGQPAIIS | |
| | | | KASGYTFTGYF | | CKASQSVSFAG | |
| | | | MNWVKQSPGQS | | TSLMHWYHQKP | |
| | | | LEWIGRIHPYD | | GQQPRLLIYRA | |
| | | | GDTFYNQKFQG | | SNLEAGVPDRF | |
| | | | KATLTVDKSSN | | SGSGSKTDFTL | |
| | | | TAHMELLSLTS | | TISPVEAEDAA | |
| | | | EDFAVYYCTRY | | TYYCQQSREYP | |
| | | | DGSRAMDYWGQ | | YTFGGGTKLEI | |
| | | | GTTVTVSS | | K | |
| 26B3.F2 | | FOLR1 | GPELVKPGASV | 761 | PASLSASVGET | 861 |
| | | | KISCKASDYSF | | VTITCRTSENI | |
| | | | TGYFMNWYMQS | | FSYLAWYQQKQ | |
| | | | HGKSLEWIGRI | | GISPQLLVYNA | |
| | | | FPYNGDTFYNQ | | KTLAEGVPSRF | |
| | | | KFKGRATLTVD | | SGSGSGTQFSL | |
| | | | KSSSTAHMELR | | KINSLQPEDFG | |
| | | | SLASEDSAVYF | | SYYCQHHYAFP | |
| | | | CARGTHYFDYW | | WTFGGGSKLEI | |
| | | | GQGTTLTVSS | | K | |
| RG7686 | GC33 | GPC3 | QVQLVQSGAEV | 762 | DWMTQSPLSL | 862 |
| | | | KKPGASVKVSC | | PVTPGEPASIS | |
| | | | KASGYTFTDYE | | CRSSQSLVHSN | |
| | | | MHWVRQAPGQG | | GNTYLHWYLQK | |
| | | | LEWMGALDPKT | | PGQSPQLLIYK | |
| | | | GDTAYSQKFKG | | VSNRFSGVPDR | |
| | | | RVTLTADKSTS | | FSGSGSGTDFT | |
| | | | TAYMELSSLTS | | LKISRVEAEDV | |
| | | | ED | | GV | |
| | | | TAVYYCTRFYS | | YYCSQNTHVPP | |
| | | | YTYWGQGTLVT | | TFGQGTKLEIK | |
| | | | VSS | | | |
| | 4A6 | GPC3 | EVQLVQSGAEV | 763 | EIVLTQSPGTL | 863 |
| | | | KKPGESLKISC | | SLSPGERATLS | |
| | | | KGSGYSFTSYW | | CRAVQSVSSSY | |
| | | | IAWVRQMPGKG | | LAWYQQKPGQA | |
| | | | LEWMGIIFPGD | | PRLLIYGASSR | |
| | | | SDTRYSPSFQG | | ATGIPDRFSGS | |
| | | | QVTISADRSIR | | GSGTDFTLTIS | |
| | | | TAYLQWSSLKA | | RLEPEDFAVYY | |
| | | | SD | | CQQYGSSPTFG | |
| | | | TALYYCARTRE | | GGTKVEIK | |
| | | | GYFDYWGQGTL | | | |
| | | | VTVSS | | | |
| | | | EVQLVQSGAEV | 764 | EIVLTQSPGTL | 864 |
| | | | KKPGESLKISC | | SLSPGERATLS | |
| | | | KGSGYSFTNYW | | CRASQSVSSSY | |
| | | | IAWVRQMPGKG | | LAWYQQKPGQA | |
| | | | LEWMGIIYPGD | | PRLLIYGASSR | |
| | 11E7 | GPC3 | SDTRYSPSFQG | | ATGIPDRFSGS | |
| | | | QVTISADKSIR | | GSGTDFTLTIS | |
| | | | TAYLQWSSLKA | | RLEPEDFAVYY | |
| | | | SD | | CQQYGSSPTFG | |
| | | | TAMYYCARTRE | | GGTKVEIK | |
| | | | GYFDYWGQGTL | | | |
| | | | VTVSS | | | |
| | 16D10 | GPC3 | EVQLVQSGADV | 765 | EILLTQSPGTL | 865 |
| | | | TKPGESLKISC | | SLSPGERATLS | |
| | | | KVSGYRFTNYW | | CRASQSVSSSY | |
| | | | IGWMRQMSGKG | | LAWYQQKPGQA | |
| | | | LEWMGIIYPGD | | PRLLIYGASSR | |
| | | | SDTRYSPSFQG | | ATGIPDRFSGS | |
| | | | HVTISADKSIN | | GSGTDFTLTIS | |
| | | | TAYLRWSSLKA | | RLEPEDFAVYY | |
| | | | SD | | CQQYGSSPTFG | |
| | | | TAIYYCARTRE | | QGTKVEIK | |
| | | | GFFDYWGQGTP | | | |
| | | | VTVSS | | | |
| AMG-595 | | EGFR | QVQLVESGGGV | 766 | DTVMTQTPLSS | 866 |
| | | | VQSGRSLRLSC | | HVTLGQPASIS | |
| | | | AASGFTFRNYG | | CRSSQSLVHSD | |
| | | | MHWVRQAPGKG | | GNTYLSWLQQR | |
| | | | LEWVAVIWYDG | | PGQPPRLLIYR | |
| | | | SDKYYADSVRG | | ISRRFSGVPDR | |
| | | | RFTISRDNSKN | | FSGSGAGTDFT | |
| | | | TLYLQMNSLRA | | LEISRVEAEDV | |
| | | | EDTAVYYCARD | | GVYYCMQSTHV | |
| | | | GYDILTGNPRD | | PRTFGQGTKVE | |
| | | | FDYWGQGTLVT | | IK | |
| | | | VSS | | | |
| Erubitux™ | cetutximab | EGFR | QVQLKQSGPGL | 767 | DILLTQSPVIL | 867 |
| | | | VQPSQSLSITC | | SVSPGERVSFS | |
| | | | TVSGFSLTNYG | | CRASQSIGTNI | |
| | | | VHWVRQSPGKG | | HWYQQRTNGSP | |
| | | | LEWLGVIWSGG | | RLLIKYASESI | |
| | | | NTDYNTPFTSR | | SGIPSRFSGSG | |
| | | | LSINKDNSKSQ | | SGTDFTLSINS | |
| | | | VFFKMNSLQSN | | VESEDIADYYC | |
| | | | DTAIYYCARAL | | QQNNNWPTTFG | |
| | | | TYYDYEFAYWG | | AGTKLELK | |
| | | | QGTLVTVSA | | | |
| GA201 | Imgatuzumab | EGFR | QVQLVQSGAEV | 768 | DIQMTQSPSSL | 868 |
| | | | KKPGSSVKVSC | | SASVGDRVTIT | |
| | | | KASGFTFTDYK | | CRASQGINNYL | |
| | | | IHWVRQAPGQG | | NWYQQKPGKAP | |
| | | | LEWMGYFNPNS | | KRLIYNTNNLQ | |
| | | | GYSTYAQKFQG | | TGVPSRFSGSG | |
| | | | RVTITADKSTS | | SGTEFTLTISS | |
| | | | TAYMELSSLRS | | LQPEDFATYYC | |
| | | | EDTAVYYCARL | | LQHNSFPTFGQ | |
| | | | SPGGYYVMDAW | | GTKLEIK | |
| | | | GQGTTVTVSS | | | |
| Humax | zalutumumab | EGFR | QVQLVESGGGV | 769 | AIQLTQSPSSL | 869 |
| | | | VQPGRSLRLSC | | SASVGDRVTIT | |
| | | | AASGFTFSTYG | | CRASQDISSAL | |
| | | | MHWVRQAPGKG | | VWYQQKPGKAP | |
| | | | LEWVAVIWDDG | | KLLIYDASSLE | |
| | | | SYKYYGDSVKG | | SGVPSRFSGSE | |
| | | | RFTISRDNSKN | | SGTDFTLTISS | |
| | | | TLYLQMNSLRA | | LQPEDFATYYC | |
| | | | EDTAVYYCARD | | QQFNSYPLTFG | |
| | | | GITMVRGVMKD | | GGTKVEIK | |
| | | | YFDYWGQGTLV | | | |
| | | | TVSS | | | |
| IMC-11F8 | necitumumab | EGFR | QVQLQESGPGL | 770 | EIVMTQSPATL | 870 |
| | | | VKPSQTLSLTC | | SLSPGERATLS | |
| | | | TVSGGSISSGD | | CRASQSVSSYL | |
| | | | YYWSWIRQPPG | | AWYQQKPGQAP | |
| | | | KGLEWIGYIYY | | RLLI YDASNRA | |
| | | | SGSTDYNPSLK | | TGIPARFSGSG | |
| | | | SRVTMSVDTSK | | SGTDFTLTISS | |
| | | | NQFSLKVNSVT | | LEPEDFAVYYC | |
| | | | AADTAVYYCAR | | HQYGSTPLTFG | |
| | | | VSIFGVGTFDY | | GGTKAEIK | |
| | | | WGQGTLVTVSS | | | |
| MM-151 | P1X | EGFR | QVQLVQSGAEV | 771 | DIQMTQSPSTL | 871 |
| | | | KKPGSSVKVSC | | SASVGDRVTIT | |
| | | | KASGGTFSSYA | | CRASQSISSWW | |
| | | | ISWVRQAPGQG | | AWYQQKPGKAP | |
| | | | LEWMGSIIPIF | | KLLIYDASSLE | |
| | | | GTVNYAQKFQG | | SGVPSRFSGSG | |
| | | | RVTITADESTS | | SGTEFTLTISS | |
| | | | TAYMELSSLRS | | LQPDDFATYYC | |
| | | | EDTAVYYCARD | | QQYHAHPTTFG | |
| | | | PSVNLYWYFDL | | GGTKVEIK | |
| | | | WGRGTLVTVSS | | | |
| MM-151 | P2X | EGFR | QVQLVQSGAEV | 772 | DIVMTQSPDSL | 872 |
| | | | KKPGSSVKVSC | | AVSLGERATIN | |
| | | | KASGGTFGSYA | | CKSSQSVLYSP | |
| | | | ISWVRQAPGQG | | NNKNYLAWYQQ | |
| | | | LEWMGSIIPIF | | KPGQPPKLLIY | |
| | | | GAANPAQKSQG | | WASTRESGVPD | |
| | | | RVTITADESTS | | RFSGSGSGTDF | |
| | | | TAYMELSSLRS | | TLTISSLQAED | |
| | | | EDTAVYYCAKM | | VAVYYCQQYYG | |
| | | | GRGKVAFDIWG | | SPITFGGGTKV | |
| | | | QGTMVTVSS | | EIK | |
| MM-151 | P3X | EGFR | QVQLVQSGAEV | 773 | EIVMTQSPATL | 873 |
| | | | KKPGASVKVSC | | SVSPGERATLS | |
| | | | KASGYAFTSYG | | CRASQSVSSNL | |
| | | | INWVRQAPGQG | | AWYQQKPGQAP | |
| | | | LEWMGWISAYN | | RLLIYGASTRA | |
| | | | GNTYYAQKLRG | | TGIPARFSGSG | |
| | | | RVTMTTDTSTS | | SGTEFTLTISS | |
| | | | TAYMELRSLRS | | LQSEDFAVYYC | |
| | | | DDTAVYYCARD | | QDYRTWPRRVF | |
| | | | LGGYGSGSVPF | | GGGTKVEIK | |
| | | | DPWGQGTLVTV | | | |
| | | | SS | | | |
| TheraCIM | nimotuzumab | EGFR | QVQLQQSGAEV | 774 | DIQMTQSPSSL | 874 |
| | | | KKPGSSVKVSC | | SASVGDRVTIT | |
| | | | KASGYTFTNYY | | CRSSQNIVHSN | |
| | | | IYWVRQAPGQG | | GNTYLDWYQQT | |
| | | | LEWIGGINPTS | | PGKAPKLLIYK | |
| | | | GGSNFNEKFKT | | VSNRFSGVPSR | |
| | | | RVTITADESST | | FSGSGSGTDFT | |
| | | | TAYMELSSLRS | | FTISSLQPEDI | |
| | | | EDTAFYFCTRQ | | ATYYCFQYSHV | |
| | | | GLWFDSDGRGF | | PWTFGQGTKLQ | |
| | | | DFWGQGTTVTV | | IT | |
| | | | SS | | | |
| Vectibix™ | panitumimab | EGFR | QVQLQESGPGL | 775 | DIQMTQSPSSL | 875 |
| | | | VKPSETLSLTC | | SASVGDRVTIT | |
| | | | TVSGGSVSSGD | | CQASQDISNYL | |
| | | | YYWTWIRQSPG | | NWYQQKPGKAP | |
| | | | KGLEWIGHIYY | | KLLIYDASNLE | |
| | | | SGNTNYNPSLK | | TGVPSRFSGSG | |
| | | | SRLTISIDTSK | | SGTDFTFTISS | |
| | | | TQFSLKLSSVT | | LQPEDIATYFC | |
| | | | AADTAIYYCVR | | QHFDHLPLAFG | |
| | | | DRVTGAFDIWG | | GGTKVEIK | |
| | | | QGTMVTVSS | | | |
| 07D06 | | EGFR | QIQLVQSGPEL | 776 | DWMTQTPLSL | 876 |
| | | | KKPGETVKISC | | PVSLGDQASIS | |
| | | | KASGYTFTEYP | | CRSSQSLVHSN | |
| | | | IHWVKQAPGKG | | GNTYLHWYLQK | |
| | | | FKWMGMIYTDI | | PGQSPKLLIYK | |
| | | | GKPTYAEEFKG | | VSNRFSGVPDR | |
| | | | RFAFSLETSAS | | FSGSGSGTDFT | |
| | | | TAYLQINNLKN | | LKISRVEAEDL | |
| | | | EDTATYFCVRD | | GVYFCSQSTHV | |
| | | | RYDSLFDYWGQ | | PWTFGGGTKLE | |
| | | | GTTLTVSS | | IK | |
| 12D03 | | EGFR | EMQLVESGGGF | 777 | DWMTQTPLSL | 877 |
| | | | VKPGGSLKLSC | | PVSLGDQASIS | |
| | | | AASGFAFSHYD | | CRSSQSLVHSN | |
| | | | MSWVRQTPKQR | | GNTYLHWYLQK | |
| | | | LEWVAYIASGG | | PGQSPKLLIYK | |
| | | | DITYYADTVKG | | VSNRFSGVPDR | |
| | | | RFTISRDNAQN | | FSGSGSGTDFT | |
| | | | TLYLQMSSLKS | | LKISRVEAEDL | |
| | | | EDTAMFYCSRS | | GVYFCSQSTHV | |
| | | | SYGNNGDALDF | | LTFGSGTKLEI | |
| | | | WGQGTSVTVSS | | K | |
| | C1 | HER2 | QVQLVESGGGL | 778 | QSPSFLSAFVG | 878 |
| | | | VQPGGSLRLSC | | DRITITCRASP | |
| | | | AASGFTFSSYA | | GIRNYLAWYQQ | |
| | | | MGWVRQAPGKG | | KPGKAPKLLIY | |
| | | | LEWVSSISGSS | | AASTLQSGVPS | |
| | | | RYIYYADSVKG | | RFSGSGSGTDF | |
| | | | RFTISRDNSKN | | TLTISSLQPED | |
| | | | TLYLQMNSLRA | | FATYYCQQYNS | |
| | | | EDTAVYYCAKM | | YPLSFGGGTKV | |
| | | | DASGSYFNFWG | | EIK | |
| | | | QGTLVTVSS | | | |
| Erbicin | | HER2 | QVQLLQSAAEV | 779 | QAWTQEPSFS | 879 |
| | | | KKPGESLKISC | | VSPGGTVTLTC | |
| | | | KGSGYSFTSYW | | GLSSGSVSTSY | |
| | | | IGWVRQMPGKG | | YPSWYQQTPGQ | |
| | | | LEWMGIIYPGD | | APRTLIYSTNT | |
| | | | SDTRYSPSFQG | | RSSGVPDRFSG | |
| | | | QVTISADKSIS | | SILGNKAALTI | |
| | | | TAYLQWSSLKA | | TGAQADDESDY | |
| | | | SDTAVYYCARW | | YCVLYMGSGQY | |
| | | | RDSPLWGQGTL | | VFGGGTKLTVL | |
| | | | VTVSS | | | |
| Herceptin | trastuzumab | HER2 | EVQLVESGGGL | 780 | DIQMTQSPSSL | 880 |
| | | | VQPGGSLRLSC | | SASVGDRVTIT | |
| | | | AASGFNIKDTY | | CRASQDVNTAV | |
| | | | IHWVRQAPGKG | | AWYQQKPGKAP | |
| | | | LEWVARIYPTN | | KLLIYSASFLY | |
| | | | GYTRYADSVKG | | SGVPSRFSGSR | |
| | | | RFTISADTSKN | | SGTDFTLTISS | |
| | | | TAYLQMNSLRA | | LQPEDFATYYC | |
| | | | EDTAVYYCSRW | | QQHYTTPPTFG | |
| | | | GGDGFYAMDYW | | QGTKVEIK | |
| | | | GQGTLVTVSS | | | |
| MAGH22 | margetuximab | HER2 | QVQLQQSGPEL | 781 | DIVMTQSHKFM | 881 |
| | | | VKPGASLKLSC | | STSVGDRVSIT | |
| | | | TASGFNIKDTY | | CKASQDVNTAV | |
| | | | IHWVKQRPEQG | | AWYQQKPGHSP | |
| | | | LEWIGRIYPTN | | KLLIYSASFRY | |
| | | | GYTRYDPKFQD | | TGVPDRFTGSR | |
| | | | KATITADTSSN | | SGTDFTFTISS | |
| | | | TAYLQVSRLTS | | VQAEDLAVYYC | |
| | | | EDTAVYYCSRW | | QQHYTTPPTFG | |
| | | | GGDGFYAMDYW | | GGTKVEIK | |
| | | | GQGASVTVSS | | | |
| MM-302 | F5 | HER2 | QVQLVESGGGL | 782 | QSVLTQPPSVS | 882 |
| | | | VQPGGSLRLSC | | GAPGQRVTISC | |
| | | | AASGFTFRSYA | | TGSSSNIGAGY | |
| | | | MSWVRQAPGKG | | GVHWYQQLPGT | |
| | | | LEWVSAISGRG | | APKLLIYGNTN | |
| | | | DNTYYADSVKG | | RPSGVPDRFSG | |
| | | | RFTISRDNSKN | | FKSGTSASLAI | |
| | | | TLYLQMNSLRA | | TGLQAEDEADY | |
| | | | EDTAVYYCAKM | | YCQFYDSSLSG | |
| | | | TSNAFAFDYWG | | WVFGGGTKLTV | |
| | | | QGTLVTVSS | | L | |
| Perjeta | pertuzumab | HER2 | EVQLVESGGGL | 783 | DIQMTQSPSSL | 883 |
| | | | VQPGGSLRLSC | | SASVGDRVTIT | |
| | | | AASGFTFTDYT | | CKASQDVSIGV | |
| | | | MDWVRQAPGKG | | AWYQQKPGKAP | |
| | | | LEWVADVNPNS | | KLLIYSASYRY | |
| | | | GGSIYNQRFKG | | TGVPSRFSGSG | |
| | | | RFTLSVDRSKN | | SGTDFTLTISS | |
| | | | TLYLQMNSLRA | | LQPEDFATYYC | |
| | | | EDTAVYYCARN | | QQYYIYPYTFG | |
| | | | LGPSFYFDYWG | | QGTKVEIK | |
| | | | QGTLVTVSS | | | |
| MM-121/ | | HER3 | EVQLLESGGGL | 784 | QSALTQPASVS | 884 |
| SAR256212 | | | VQPGGSLRLSC | | GSPGQSITISC | |
| | | | AASGFTFSHYV | | TGTSSDVGSYN | |
| | | | MAWVRQAPGKG | | VVSWYQQHPGK | |
| | | | LEWVSSISSSG | | APKLIIYEVSQ | |
| | | | GWTLYADSVKG | | RPSGVSNRFSG | |
| | | | RFTISRDNSKN | | SKSGNTASLTI | |
| | | | TLYLQMNSLRA | | SGLQTEDEADY | |
| | | | EDTAVYYCTRG | | YCCSYAGSSIF | |
| | | | LKMATIFDYWG | | VIFGGGTKVTV | |
| | | | QGTLVTVSS | | L | |
| MEHD7945 | Duligotumab | EGFR/HE | EVQLVESGGGL | 785 | DIQMTQSPSSL | 885 |
| A | | R3 | VQPGGSLRLSC | | SASVGDRVTIT | |
| | | | AASGFTLSGDW | | CRASQNIATDV | |
| | | | IHWVRQAPGKG | | AWYQQKPGKAP | |
| | | | LEWVGEISAAG | | KLLIYSASFLY | |
| | | | GYTDYADSVKG | | SGVPSRFSGSG | |
| | | | RFTISADTSKN | | SGTDFTLTISS | |
| | | | TAYLQMNSLRA | | LQPEDFATYYC | |
| | | | EDTAVYYCARE | | QQSEPEPYTFG | |
| | | | SRVSFEAAMDY | | QGTKVEIK | |
| | | | WGQGTLVTVSS | | | |
| MM-111 | | HER2/3 | QVQLQESGGGL | 786 | QSALTQPASVS | 886 |
| | | | VKPGGSLRLSC | | GSPGQSITISC | |
| | | | AASGFTFSSYW | | TGTSSDVGGYN | |
| | | | MSWVRQAPGKG | | FVSWYQQHPGK | |
| | | | LEWVANINRDG | | APKLMIYDVSD | |
| | | | SASYYVDSVKG | | RPSGVSDRFSG | |
| | | | RFTISRDDAKN | | SKSGNTASLII | |
| | | | SLYLQMNSLRA | | SGLQADDEADY | |
| | | | EDTAVYYCARD | | YCSSYGSSSTH | |
| | | | RGVGYFDLWGR | | VIFGGGTKVTV | |
| | | | GTLVTVSS | | L | |
| MM-111 | | HER2/3 | QVQLVQSGAEV | 787 | QSVLTQPPSVS | 887 |
| | | | KKPGESLKISC | | AAPGQ | |
| | | | KGSGYSFTSYW | | KVTISCSGSSS | |
| | | | IAWVRQMPGKG | | NIGNNYVSWYQ | |
| | | | LEYMGLIYPGD | | QLPGTAPKLLI | |
| | | | SDTKYSPSFQG | | YDHTNRPAGVP | |
| | | | QVTISVDKSVS | | DRFSGSKSGTS | |
| | | | TAYLQWSSLKP | | ASLAISGFRSE | |
| | | | SDSAVYFCARH | | DEADYYCASWD | |
| | | | DVGYCTDRTCA | | YTLSGWVFGGG | |
| | | | KWPEWLGVWGQ | | TKLTVL | |
| | | | GTLVTVSS | | | |
| | Hu3S193 | Lewis-Y | EVQLVESGGGV | 788 | DIQMTQSPSSL | 888 |
| | | | VQPGRSLRLSC | | SASVGDRVTIT | |
| | | | STSGFTFSDYY | | CRSSQRIVHSN | |
| | | | MYWVRQAPGKG | | GNTYLEWYQQT | |
| | | | LEWVAYMSNVG | | PGKAPKLLIYK | |
| | | | AITDYPDTVKG | | VSNRFSGVPSR | |
| | | | RFTISRDNSKN | | FSGSGSGTDFT | |
| | | | TLFLQMDSLRP | | FTISSLQPEDI | |
| | | | EDTGVYFCARG | | ATYYCFQGSHV | |
| | | | TRDGSWFAYWG | | PFTFGQGTKLQ | |
| | | | QGTPVTVSS | | IT | |
| BAY 94- | anetumab | Mesothelin | QVELVQSGAEV | 789 | DIALTQPASVS | 889 |
| 9343 | ravtansine | | KKPGESLKISC | | GSPGQSITISC | |
| | | | KGSGYSFTSYW | | TGTSSDIGGYN | |
| | | | IGWVRQAPGKG | | SVSWYQQHPGK | |
| | | | LEWMGIIDPGD | | APKLMIYGVNN | |
| | | | SRTRYSPSFQG | | RPSGVSMRFSG | |
| | | | QVTISADKSIS | | SKSGNTASLTI | |
| | | | TAYLQWSSLKA | | SGLQAEDEADY | |
| | | | SDTAMYYCARG | | YCSSYDIESAT | |
| | | | QLYGGTYMDGW | | PVFGGGTKLTV | |
| | | | GQGTLVTVSS | | L | |
| | SS1 | Mesothelin | QVQLQQSGPEL | 790 | DIELTQSPAIM | 890 |
| | | | EKPGASVKISC | | SASPGEKVTMT | |
| | | | KASGYSFTGYT | | CSASSSVSYMH | |
| | | | MNWVKQSHGKS | | WYQQKSGTSPK | |
| | | | LEWIGLITPYN | | RWIYDTSKLAS | |
| | | | GASSYNQKFRG | | GVPGRFSGSGS | |
| | | | KATLTVDKSSS | | GNSYSLTISSV | |
| | | | TAYMDLLSLTS | | EAEDDATYYCQ | |
| | | | EDSAVYFCARG | | QWSGYPLTFGA | |
| | | | GYDGRGFDYWG | | GTKLEIK | |
| | | | QGTTVTVSS | | | |
| | | Mesothelin | QVYLVESGGGV | 791 | EIVLTQSPATL | 891 |
| | | | VQPGRSLRLSC | | SLSPGERATLS | |
| | | | AASGITFSIYG | | CRASQSVSSYL | |
| | | | MHWVRQAPGKG | | AWYQQKPGQAP | |
| | | | LEWVAVIWYDG | | RLLIYDASNRA | |
| | | | SHEYYADSVKG | | TGIPARFSGSG | |
| | | | RFTISRDNSKN | | SGTDFTLTISS | |
| | | | TLYLLMNSLRA | | LEPEDFAVYYC | |
| | | | ED | | QQ | |
| | | | TAVYYCARDGD | | RSNWPLTFGGG | |
| | | | YYDSGSPLDYW | | TKVEIK | |
| | | | GQGTLVTVSS | | | |
| | | Mesothelin | QVHLVESGGGV | 792 | EIVLTQSPATL | 892 |
| | | | VQPGRSLRLSC | | SLSPGERATLS | |
| | | | VASGITFRIYG | | CRASQSVSSYL | |
| | | | MHWVRQAPGKG | | AWYQQKPGQAP | |
| | | | LEWVAVLWYDG | | RLLIYDASNRA | |
| | | | SHEYYADSVKG | | TGIPARFSGSG | |
| | | | RFTISRDNSKN | | SGTDFTLTISS | |
| | | | TLYLQMNSLRA | | LEPEDFAVYYC | |
| | | | ED | | QQ | |
| | | | TAIYYCARDGD | | RSNWPLTFGGG | |
| | | | YYDSGSPLDYW | | TKVEIK | |
| | | | GQGTLVTVSS | | | |
| | | Mesothelin | EVHLVESGGGL | 793 | EIVLTQSPGTL | 893 |
| | | | VQPGGSLRLSC | | SLSPGERATLS | |
| | | | AASGFTFSRYW | | CRASQSVSSSY | |
| | | | MSWVRQAQGKG | | LAWYQQKPGQA | |
| | | | LEWVASIKQAG | | PRLLIYGASSR | |
| | | | SEKTYVDSVKG | | ATGIPDRFSGS | |
| | | | RFTISRDNAKN | | GSGTDFTLTIS | |
| | | | SLSLQMNSLRA | | RLEPEDFAVYY | |
| | | | ED | | CQ | |
| | | | TAVYYCAREGA | | QYGSSQYTFGQ | |
| | | | YYYDSASYYPY | | GTKLEIK | |
| | | | YYYYSMDVWGQ | | | |
| | | | GTTVTVSS | | | |
| MORAb-009 | amatuximab | Mesothelin | QVQLQQSGPEL | 794 | DIELTQSPAIM | 894 |
| | | | EKPGASVKISC | | SASPGEKVTMT | |
| | | | KASGYSFTGYT | | CSASSSVSYMH | |
| | | | MNWVKQSHGKS | | WYQQKSGTSPK | |
| | | | LEWIGLITPYN | | RWIYDTSKLAS | |
| | | | GASSYNQKFRG | | GVPGRFSGSGS | |
| | | | KATLTVDKSSS | | GNSYSLTISSV | |
| | | | TAYMDLLSLTS | | EAEDDATYYCQ | |
| | | | EDSAVYFCARG | | QWSKHPLTFGS | |
| | | | GYDGRGFDYWG | | GTKVEIK | |
| | | | SGTPVTVSS | | | |
| hPAM4 | | MUC-1 | EVQLQESGPEL | 795 | DIVMTQSPAIM | 895 |
| | | | VKPGASVKMSC | | SASPGEKVTMT | |
| | | | KASGYTFPSYV | | CSASSSVSSSY | |
| | | | LHWVKQKPGQG | | LYWYQQKPGSS | |
| | | | LEWIGYINPYN | | PKLWIYSTSNL | |
| | | | DGTQYNEKFKG | | ASGVPARFSGS | |
| | | | KATLTSDKSSS | | GSGTSYSLTIS | |
| | | | TAYMELSRLTS | | SMEAEDAASYF | |
| | | | ED | | CH | |
| | | | SAVYYCARGFG | | QWNRYPYTFGG | |
| | | | GSYGFAYWGQG | | GTKLEIK | |
| | | | TLITVSA | | | |
| hPAM4- | clivatuzumab | MUC1 | QVQLQQSGAEV | 796 | DIQLTQSPSSL | 896 |
| Cide | | | KKFGASVKVSC | | SASVGDRVTMT | |
| | | | EASGYTFPSYV | | CSASSSVSSSY | |
| | | | LHWVKQAPGQG | | LYWYQQKPGKA | |
| | | | LEWIGYINPYN | | PKLWIYSTSNL | |
| | | | DGTQTNKKFKG | | ASGVPARFSGS | |
| | | | KATLTRDTSIN | | GSGTDFTLTIS | |
| | | | TAYMELSRLRS | | SLQPEDSASYF | |
| | | | DDTAVYYCARG | | CHQWNRYPYTF | |
| | | | FGGSYGFAYNG | | GGGTRLEIK | |
| | | | QGTLVTVSS | | | |
| SAR566658 | huDS6v1.01 | MUC1 | QAQLQVSGAEV | 797 | EIVLTQSPATM | 897 |
| | | | VKPGASVKMSC | | SASPGERVTIT | |
| | | | KASGYTFTSYN | | CSAHSSVSFMH | |
| | | | MHWVKQTPGQG | | WFQQKPGTSPK | |
| | | | LEWIGYIYPGN | | LWIYSTSSLAS | |
| | | | GATNYNQKFQG | | GVPARFGGSGS | |
| | | | KATLTADTSSS | | GTSYSLTISSM | |
| | | | TAYMQISSLTS | | EAEDAATYYCQ | |
| | | | EDSAVYFCARG | | QRSSFPLTFGA | |
| | | | DSVPFAYWGQG | | GTKLELK | |
| | | | TLVTVSA | | | |
| Theragyn | Pemtumomab | MUC1 | QVQLQQSGAEL | 798 | DIVMSQSPSSL | 898 |
| | muHMFG1 | | MKPGASVKISC | | AVSVGEKVTMS | |
| | | | KATGYTFSAYW | | CKSSQSLLYSS | |
| | | | IEWVKQRPGHG | | NQKIYLAWYQQ | |
| | | | LEWIGEILPGS | | KPGQSPKLLIY | |
| | | | NNSRYNEKFKG | | WASTRESGVPD | |
| | | | KATFTADTSSN | | RFTGGGSGTDF | |
| | | | TAYMQLSSLTS | | TLTISSVKAED | |
| | | | EDSAVYYCSRS | | LAVYYCQQYYR | |
| | | | YDFAWFAYWGQ | | YPRTFGGGTKL | |
| | | | GTPVTVSA | | EIK | |
| Therex | Sontuzumab | MUC1 | QVQLVQSGAEV | 799 | DIQMTQSPSSL | 899 |
| | huHMFG1 | | KKPGASVKVSC | | SASVGDRVTIT | |
| | AS1402 | | KASGYTFSAYW | | CKSSQSLLYSS | |
| | R1150 | | IEWVRQAPGKG | | NQKIYLAWYQQ | |
| | | | LEWVGEILPGS | | KPGKAPKLLIY | |
| | | | NNSRYNEKFKG | | WASTRESGVPS | |
| | | | RVTVTRDTSTN | | RFSGSGSGTDF | |
| | | | TAYMELSSLRS | | TFTISSLQPED | |
| | | | EDTAVYYCARS | | IATYYCQQYYR | |
| | | | YDFAWFAYWGQ | | YPRTFGQGTKV | |
| | | | GTLVTVSS | | EIK | |
| MDX-1105 | | PD-L1 | QVQLVQSGAEV | 800 | EIVLTQSPATL | 900 |
| or BMS- | | | KKPGSSVKVSC | | SLSPGERATLS | |
| 936559 | | | KTSGDTFSTYA | | CRASQSVSSYL | |
| | | | ISWVRQAPGQG | | AWYQQKPGQAP | |
| | | | LEWMGGIIPIF | | RLLIYDASNRA | |
| | | | GKAHYAQKFQG | | TGIPARFSGSG | |
| | | | RVTITADESTS | | SGTDFTLTISS | |
| | | | TAYMELSSLRS | | LEPEDFAVYYC | |
| | | | EDTAVYFCARK | | QQRSNWPTFGQ | |
| | | | FHFVSGSPFGM | | GTKVEIK | |
| | | | DVWGQGTTVTV | | | |
| | | | SS | | | |
| MEDI-4736 | durvalumab | PD-L1 | EVQLVESGGGL | 801 | EIVLTQSPGTL | 901 |
| | | | VQPGGSLRLSC | | SLSPGERATLS | |
| | | | AASGFTFSRYW | | CRASQRVSSSY | |
| | | | MSWVRQAPGKG | | LAWYQQKPGQA | |
| | | | LEWVANIKQDG | | PRLLIYDASSR | |
| | | | SEKYYVDSVKG | | ATGIPDRFSGS | |
| | | | RFTISRDNAKN | | GSGTDFTLTIS | |
| | | | SLYLQMNSLRA | | RLEPEDFAVYY | |
| | | | EDTAVYYCARE | | CQQYGSLPWTF | |
| | | | GGWFGELAFDY | | GQGTKVEIK | |
| | | | WGQGTLVTVSS | | | |
| MPDL3280A | atezolizumab | PD-L1 | EVQLVESGGGL | 802 | DIQMTQSPSSL | 902 |
| | | | VQPGGSLRLSC | | SASVGDRVTIT | |
| | | | AASGFTFSDSW | | CRASQDVSTAV | |
| | | | IHWVRQAPGKG | | AWYQQKPGKAP | |
| | | | LEWVAWISPYG | | KLLIYSASFLY | |
| | | | GSTYYADSVKG | | SGVPSRFSGSG | |
| | | | RFTISADTSKN | | SGTDFTLTISS | |
| | | | TAYLQMNSLRA | | LQPEDFATYYC | |
| | | | EDTAVYYCARR | | QQYLYHPATFG | |
| | | | HWPGGFDYWGQ | | QGTKVEIK | |
| | | | GTLVTVSS | | | |
| MSB0010718C | avelumab | PD-L1 | EVQLLESGGGL | 803 | QSALTQPASVS | 903 |
| | | | VQPGGSLRLSC | | GSPGQSITISC | |
| | | | AASGFTFSSYI | | TGTSSDVGGYN | |
| | | | MMWVRQAPGKG | | YVSWYQQHPGK | |
| | | | LEWVSSIYPSG | | APKLMIYDVSN | |
| | | | GITFYADTVKG | | RPSGVSNRFSG | |
| | | | RFTISRDNSKN | | SKSGNTASLTI | |
| | | | TLYLQMNSLRA | | SGLQAEDEADY | |
| | | | EDTAVYYCARI | | YCSSYTSSSTR | |
| | | | KLGTVTTVDYW | | VFGTGTKVTVL | |
| | | | GQGTLVTVSS | | | |
| MLN591 | | PSMA | EVQLVQSGPEV | 804 | DIQMTQSPSSL | 904 |
| | | | KKPGATVKISC | | STSVGDRVTLT | |
| | | | KTSGYTFTEYT | | CKASQDVGTAV | |
| | | | IHWVKQAPGKG | | DWYQQKPGPSP | |
| | | | LEWIGNINPNN | | KLLIYWASTRH | |
| | | | GGTTYNQKFED | | TGIPSRFSGSG | |
| | | | KATLTVDKSTD | | SGTDFTLTISS | |
| | | | TAYMELSSLRS | | LQPEDFADYYC | |
| | | | EDTAVYYCAAG | | QQYNSYPLTFG | |
| | | | WNFDYWGQGTL | | PGTKVDIK | |
| | | | LTVSS | | | |
| MT112 | pasotuxizumab | PSMA | QVQLVESGGGL | 805 | DIQMTQSPSSL | 905 |
| | | | VKPGESLRLSC | | SASVGDRVTIT | |
| | | | AASGFTFSDYY | | CKASQNVDTNY | |
| | | | MYWVRQAPGKG | | AWYQQKPGQAP | |
| | | | LEWVAIISDGG | | KSLIYSASYRY | |
| | | | YYTYYSDIIKG | | SDVPSRFSGSA | |
| | | | RFTISRDNAKN | | SGTDFTLTISS | |
| | | | SLYLQMNSLKA | | VQSEDFATYYC | |
| | | | EDTAVYYCARG | | QQYDSYPYTFG | |
| | | | FPLLRHGAMDY | | GGTKLEIK | |
| | | | WGQGTLVTVSS | | | |
| | | ROR1 | QEQLVESGGRL | 806 | ELVLTQSPSVS | 906 |
| | | | VTPGGSLTLSC | | AALGSPAKITC | |
| | | | KASGFDFSAYY | | TLSSAHKTDTI | |
| | | | MSWVRQAPGKG | | DWYQQLQGEAP | |
| | | | LEWIATIYPSS | | RYLMQVQSDGS | |
| | | | GKTYYATWVNG | | YTKRPGVPDRF | |
| | | | RFTISSDNAQN | | SGSSSGADRYL | |
| | | | TVDLQMNSLTA | | IIPSVQADDEA | |
| | | | AD | | DY | |
| | | | RATYFCARDSY | | YCGADYIGGYV | |
| | | | ADDGALFNIWG | | FGGGTQLTVTG | |
| | | | PGTLVTISS | | | |
| | | ROR1 | EVKLVESGGGL | 807 | DIKMTQSPSSM | 907 |
| | | | VKPGGSLKLSC | | YASLGERVTIT | |
| | | | AASGFTFSSYA | | CKASPDINSYL | |
| | | | MSWVRQIPEKR | | SWFQQKPGKSP | |
| | | | LEWVASISRGG | | KTLIYRANRLV | |
| | | | TTYYPDSVKGR | | DGVPSRFSGGG | |
| | | | FTISRDNVRNI | | SGQDYSLTINS | |
| | | | LYLQMSSLRSE | | LEYEDMGIYYC | |
| | | | DT | | LQ | |
| | | | AMYYCGRYDYD | | YDEFPYTFGGG | |
| | | | GYYAMDYWGQG | | TKLEMK | |
| | | | TSVTVSS | | | |
| | | ROR1 | QSLEESGGRLV | 808 | ELVMTQTPSSV | 908 |
| | | | TPGTPLTLTCT | | SAAVGGTVTIN | |
| | | | VSGIDLNSHWM | | CQASQSIGSYL | |
| | | | SWVRQAPGKGL | | AWYQQKPGQPP | |
| | | | EWIGIIAASGS | | KLLIYYASNLA | |
| | | | TYYANWAKGRF | | SGVPSRFSGSG | |
| | | | TISKTSTTVDL | | SGTEYTLTISG | |
| | | | RIASPTTEDTA | | VQREDAATYYC | |
| | | | TY | | LG | |
| | | | FCARDYGDYRL | | SLSNSDNVFGG | |
| | | | VTFNIWGPGTL | | GTELEIL | |
| | | | VTVSS | | | |
| | | ROR1 | QSVKESEGDLV | 809 | ELVMTQTPSST | 909 |
| | | | TPAGNLTLTCT | | SGAVGGTVTIN | |
| | | | ASGSDINDYPI | | CQASQSIDSNL | |
| | | | SWVRQAPGKGL | | AWFQQKPGQPP | |
| | | | EWIGFINSGGS | | TLLIYRASNLA | |
| | | | TWYASWVKGRF | | SGVPSRFSGSR | |
| | | | TISRTSTTVDL | | SGTEYTLTISG | |
| | | | KMTSLTTDDTA | | VQREDAATYYC | |
| | | | TY | | LG | |
| | | | FCARGYSTYYC | | GVGNVSYRTSF | |
| | | | DFNIWGPGTLV | | GGGTEVWK | |
| | | | TISS | | | |
| CC49 | | TAG-72 | QVQLVQSGAEV | 810 | DIVMSQSPDSL | 910 |
| (Humanized) | | | VKPGASVKISC | | AVSLGERVTLN | |
| | | | KASGYTFTDHA | | CKSSQSLLYSG | |
| | | | IHWVKQNPGQR | | NQKNYLAWYQQ | |
| | | | LEWIGYFSPGN | | KPGQSPKLLIY | |
| | | | DDFKYNERFKG | | WASARESGVPD | |
| | | | KATLTADTSAS | | RFSGSGSGTDF | |
| | | | TAYVELSSLRS | | TLTISSVQAED | |
| | | | EDTAVYFCTRS | | VAVYYCQQYYS | |
| | | | LNMAYWGQGTL | | YPLTFGAGTKL | |
| | | | VTVSS | | ELK | |
| | Murine A1 | TPBG/5T4 | QIQLVQSGPEL | 811 | SIVMTQTPKFL | 911 |
| | | | KKPGETVKISC | | LVSAGDRVTIT | |
| | | | KASGYTFTNFG | | CKASQSVSNDV | |
| | | | MNWVKQGPGEG | | AWYQQKPGQSP | |
| | | | LKWMGWINTNT | | KLLINFATNRY | |
| | | | GEPRYAEEFKG | | TGVPNRFTGSG | |
| | | | RXAFSLETTAS | | YGTDFTFTIST | |
| | | | TAYLQINNLKN | | VQAEDLALYFC | |
| | | | EDTATYFCARD | | QQ | |
| | | | WDGAYFFDYWG | | DYSSPWTFGGG | |
| | | | QGTTLTVSS | | TKLEIK | |
| | Murine A2 | TPBG/5T4 | QVQLQQSRPEL | 812 | SVIMSRGQIVL | 912 |
| | | | VKPGASVKMSC | | TQSPAIMSASL | |
| | | | KASGYTFTDYV | | GERVTLTCTAS | |
| | | | ISWVKQRTGQG | | SSVNSNYLHWY | |
| | | | LEWIGEIYPGS | | QQKPGSSPKLW | |
| | | | NSIYYNEKFKG | | IYSTSNLASGV | |
| | | | RATLTA | | PARFSGSGSGT | |
| | | | DKSSSTAYMQL | | SYSLTISSMEA | |
| | | | SSLTSEDSAVY | | EDAATYYCHQY | |
| | | | FCAMGGNYGFD | | HRSPLTFGAGT | |
| | | | YWGQGTTLTVS | | KLELK | |
| | | | S | | | |
| | Murine A3 | TPBG/5T4 | EVQLVESGGGL | 813 | DIVMTQSHIFM | 913 |
| | | | VQPKGSLKLSC | | STSVGDRVSIT | |
| | | | AASGFTFNTYA | | CKASQDVDTAV | |
| | | | MNWVRQAPGKG | | AWYQQKPGQSP | |
| | | | LEWVARIRSKS | | KLLIYWASTRL | |
| | | | NNYATYYADSV | | TGVPDRFTGSG | |
| | | | KDRFTISRDDS | | SGTDFTLTISN | |
| | | | QSMLYLQMNNL | | VQSEDLADYFC | |
| | | | KTEDTAMYXCV | | QQ | |
| | | | RQWDYDVRAMN | | YSSYPYTFGGG | |
| | | | YWGQGTSVTVS | | TKLEIK | |
| | | | S | | | |
| IMMU-132 | hRS-7 | TROP-2 | QVQLQQSGSEL | 814 | DIQLTQSPSSL | 914 |
| | | | KKPGASVKVSC | | SASVGDRVSIT | |
| | | | KASGYTFTNYG | | CKASQDVSIAV | |
| | | | MNWVKQAPGQG | | AWYQQKPGKAP | |
| | | | LKWMGWINTYT | | KLLIYSASYRY | |
| | | | GEPTYTDDFKG | | TGVPDRFSGSG | |
| | | | RFAFSLDTSVS | | SGTDFTLTISS | |
| | | | TAYLQISSLKA | | LQPEDFAVYYC | |
| | | | DDTAVYFCARG | | QQHYITPLTFG | |
| | | | GFGSSYWYFDV | | AGTKVEIK | |
| | | | WGQGSLVTVSS | | | |
| IMC-18F1 | icrucumab | VEGFR1 | QAQWESGGGV | 815 | EIVLTQSPGTL | 915 |
| | | | VQSGRSLRLSC | | SLSPGERATLS | |
| | | | AASGFAFSSYG | | CRASQSVSSSY | |
| | | | MHWVRQAPGKG | | LAWYQQKPGQA | |
| | | | LEWVAVIWYDG | | PRLLIYGASSR | |
| | | | SNKYYADSVRG | | ATGIPDRFSGS | |
| | | | RFTISRDNSEN | | GSGTDFTLTIS | |
| | | | TLYLQMNSLRA | | RLEPEDFAVYY | |
| | | | EDTAVYYCARD | | CQQYGSSPLTF | |
| | | | HYGSGVHHYFY | | GGGTKVEIK | |
| | | | YGLDVWGQGTT | | | |
| | | | VTVSS | | | |
| Cyramza | ramucirumab | VEGFR2 | EVQLVQSGGGL | 816 | DIQMTQSPSSV | 916 |
| | | | VKPGGSLRLSC | | SASIGDRVTIT | |
| | | | AASGFTFSSYS | | CRASQGIDNWL | |
| | | | MNWVRQAPGKG | | GWYQQKPGKAP | |
| | | | LEWVSSISSSS | | KLLIYDASNLD | |
| | | | SYIYYADSVKG | | TGVPSRFSGSG | |
| | | | RFTISRDNAKN | | SGTYFTLTISS | |
| | | | SLYLQMNSLRA | | LQAEDFAVYFC | |
| | | | EDTAVYYCARV | | QQAKAFPPTFG | |
| | | | TDAFDIWGQGT | | GGTKVDIK | |
| | | | MVTVSSA | | | |
| | | | EVQLVESGGGL | 817 | DIQMTQSPSSL | 917 |
| | | | VQPGGSLRLSC | | SASVGDRVTIT | |
| | | | AASGFTFSSYG | | CRASQDIAGSL | |
| | | | MSWVRQAPGKG | | NWLQQKPGKAI | |
| | | | LEWVATITSGG | | KRLIYATSSLD | |
| g165DFM- | alacizumabpegol | VEGFR2 | SYTYYVDSVKG | | SGVPKRFSGSR | |
| PEG | | | RFTISRDNAKN | | SGSDYTLTISS | |
| | | | TLYLQMNSLRA | | LQPEDFATYYC | |
| | | | EDTAVYYCVRI | | LQYGSFPPTFG | |
| | | | GEDALDYWGQG | | QGTKVEIK | |
| | | | TLVTVSS | | | |
| Imclone | | VEGFR2 | KVQLQQSGTEL | 818 | DIVLTQSPASL | 918 |
| 6.64 | | | VKPGASVKVSC | | AVSLGQRATIS | |
| | | | KASGYIFTEYI | | CRASESVDSYG | |
| | | | IHWVKQRSGQG | | NSFMHWYQQKP | |
| | | | LEWIGWLYPES | | GQPPKLLIYRA | |
| | | | NIIKYNEKFKD | | SNLESGIPARF | |
| | | | KATLTADKSSS | | SGSGSRTDFTL | |
| | | | TVYMELSRLTS | | TINPVEADDVA | |
| | | | EDSAVYFCTRH | | TYYCQQSNEDP | |
| | | | DGTNFDYWGQG | | LTFGAGTKLEL | |
| | | | TTLTVSSA | | K | |

### VI). Bispecific Antigen Binding Compositions—Configurations and Functional Properties

[0195] In another aspect, the present disclosure relates to novel chimeric, bispecific antigen binding compositions that bind to an antigen or epitope of the CD3 protein complex of effector cells (e.g., a T cell) and a second target cell marker associated with a diseased cell or tissue. Thus, they can be referred to as T-cell engagers. As described more fully, below, the bispecific antigen binding compositions are configured in an activatable prodrug form that confer advantages over bispecific T-cell engagers and related compounds known in the art. Various compositions of the disclosure have properties that include enhanced stability during their production and purification, enhanced stability and increased half-life in circulation when administered to a subject, the ability to become activated at intended sites of therapy but not in normal, healthy tissue, and, when activated by proteolytic cleavage of the release segments and release of the fused AF1 and AF2, exhibit binding affinity to target and effector cells that is at least comparable to a corresponding conventional bispecific IgG antibody. Upon the binding of the effector cell and target cell by the AF1 and AF2, an immunological synapse is formed that effects activation of the effector cell and promotes the subsequent destruction of the target cell via apoptosis or cytolysis.

[0196] Various subject bispecific antigen binding compositions of the disclosure described herein are specifically designed to be in a prodrug form in that the XTEN component(s) shield the antigen binding fragments, reducing their ability to bind their ligands until released from the composition by protease cleavage of any of the protease cleavage sites located within the release segments. Proteases known to be associated with diseased cells or tissues include but are not limited to serine proteases, cysteine proteases, aspartate proteases, and metalloproteases, including but not limited to the specific proteases described herein. This prodrug property of the bispecific antigen binding compositions improves the specificity of the composition towards diseased tissues or cells compared to bispecific T-cell engager therapeutics that are not in a prodrug format. In contrast, by activating the bispecific antigen binding compositions specifically in the microenvironment of the target cell or diseased tissue where the target cell marker and proteases capable of cleaving the release segments are highly expressed, the bispecific antigen binding fragments and XTEN of the constructs are released upon cleavage of the release segment, and the fused antigen binding fragments can crosslink cytotoxic effector cells with cells expressing a target cell marker in a highly specific fashion, thereby directing the cytotoxic potential of the T cell towards the target cell. After protease cleavage, the antigen binding fragments are no longer shielded and effectively regain their full potential to bind to target cells bearing a target cell marker and an effector cell such as a cytotoxic T cell via binding to the CD3 antigen, which forms part of the T cell receptor complex, causing T cell activation that mediates the subsequent lysis of the target cell expressing the particular target cell marker. Thus, the bispecific antigen binding compositions of the disclosure are contemplated to display strong, specific and efficient target cell killing. In such case, cells are eliminated selectively, thereby reducing the potential for toxic side effects.

[0197] In one aspect, the disclosure provides activatable bispecific antigen binding fragment compositions comprising two antigen binding fragments, with a first antigen binding fragment that targets an effector cell and a second antigen binding fragment that targets a cell marker associated with a disease tissue or cell; both of which have specific binding affinity for their respective ligands. The design of the subject compositions having a first and a second antigen binding fragment (AF1 and AF2, respectively) was informed by consideration of at least three properties: 1) compositions having bispecific antigen binding fragments with the capability to bind to and link together an effector cell and a target cell with the resultant formation of an immunological synapse; 2) compositions with a XTEN that i) shields both of the antigen binding fragments and reduces their ability to bind the target and effector cell ligands when the composition is in an intact prodrug form, ii) provides enhanced half-life when administered to a subject, iii) reduces extravasation of the intact composition from the circulation in normal tissues and organs compared to diseased tissues (e.g., tumor), and iv) confers an increased safety profile compared to conventional bispecific cytotoxic antibody therapeutics; and 3) is activated when the RS is cleaved by one or more mammalian proteases in proximity of diseased tissues, thereby releasing the fused bispecific antigen binding fragments such that they regain their full binding affinity potential for the target ligands. The design of the subject compositions takes advantage of the properties of XTEN and the release segment (RS) components, and their positioning relative to the bispecific antigen binding fragments achieves the foregoing properties, as evidenced by the results in the illustrative Examples, below.

[0198] In one embodiment, the polypeptides of any of the bispecific antigen binding fragment composition embodiments described herein having two antigen binding fragments (AF1 and AF2), a single RS, and a single XTEN, the polypeptide can have, in an uncleaved state, a structural arrangement from N-terminus to C-terminus of AF2-AF1-RS1-XTEN1, AF1-AF2-RS1-XTEN1, XTEN1-RS1-AF2-AF1, XTEN1-RS1-AF1-AF2, or diabody-RS1-XTEN1, or XTEN1-RS1-diabody, wherein the diabody comprises VL and VH of the AF1 and AF2.

[0199] In other aspects, the disclosure provides bispecific antigen binding compositions having two antigen binding fragments (AF1 and AF2), two RS, and two XTEN. The design of these compositions was informed by considerations of further reducing the binding affinity of the uncleaved compositions to the respective ligands of the AF1 and AF2 antibody fragments by the addition of the second XTEN in order to further reduce the unintended binding of the compositions to healthy tissues or cells when administered to a subject, thereby further improving the therapeutic index of the subject compositions compared to compositions having only one RS and one XTEN. The addition of the second RS and second XTEN resulted in a surprising reduction of binding affinity of the intact, uncleaved polypeptide to the respective ligands of the AF1 and AF2 antibody fragments relative to those compositions having a single RS and XTEN, when assayed in vitro, and also resulted in reduced toxicity in animal models of disease when administered as therapeutically-effective doses, as described in the Examples, below. In embodiments of the subject compositions having two antigen binding fragments, two RS, and two XTEN, the compositions can have, in an uncleaved state, a structural arrangement from N-terminus to C-terminus of XTEN1-RS1-AF2-AF1-RS2-XTEN2, XTEN1-RS1-AF1-AF2-RS2-XTEN2, XTEN2-RS2-AF2-AF1-RS1-XTEN1, XTEN2-RS2-AF1-AF2-RS1-XTEN1, XTEN2-RS2-diabody-RS1-XTEN1, wherein the diabody comprises VL and VH of the AF1 and AF2, or XTEN1-RS1-diabody-RS2-XTEN2, wherein the diabody comprises VL and VH of the AF1 and AF2.

[0200] It is a feature of various designed compositions that when the RS of the bispecific antigen binding composition is cleaved by a mammalian protease in the environment of the target cell and is converted from the prodrug form to the activated or apoprotein form, upon cleavage and release of the bispecific antigen binding fragments and the XTEN from the composition, the fused AF1 and AF2 bind to and link together an effector cell (e.g., a T cell bearing CD3) and a diseased cell (e.g., a tumor or cancer cell) bearing the target cell marker antigen capable of being bound by the AF2, whereupon the effector cell is activated. In one embodiment, wherein RS of the bispecific antigen binding composition is cleaved and the antigen binding fragments are released, the subsequent concurrent binding of the effector cell and the target cell can result in at least a 3-fold, or a 10-fold, or a 30-fold, or a 100-fold, or a 300-fold, or a 1000-fold activation of the effector cell, wherein the activation is assessed by the production of cytokines, cytolytic proteins, or lysis of the target cell, assessed in an in vitro cell-based assay. In another embodiment, the concurrent binding of a T cell bearing the CD3 antigen and a diseased cell bearing the target cell marker antigen by the released, fused AF1 and AF2 forms an immunologic synapse, wherein the binding results in the release of T cell-derived effector molecules capable of lysing the diseased cell. Non-limiting examples of the in vitro assay for measuring effector cell activation and/or cytolysis include cell membrane integrity assay, mixed cell culture assay, FACS based propidium Iodide assay, trypan Blue influx assay, photometric enzyme release assay, ELISA, radiometric 51Cr release assay, fluorometric Europium release assay, CalceinAM release assay, photometric MTT assay, XTT assay, WST-1 assay, alamar Blue assay, radiometric 3H-Thd incorporation assay, clonogenic assay measuring cell division activity, fluorometric Rhodamine123 assay measuring mitochondrial transmembrane gradient, apoptosis assay monitored by FACS-based phosphatidylserine exposure, ELISA-based TUNEL test assay, caspase activity assay, and cell morphology assay, or other assays known in the art for the assay of cytokines, cytolytic proteins, or lysis of cells, or the methods described in the Examples, below.

[0201] Without being bound to a particular theory, it is believed that using the bispecific antigen binding composition formats as described above, upon cleavage of the RS, the released fused AF1 and AF2 are capable of killing target cells by recruitment of cytotoxic effector cells without any need for pre- and/or co-stimulation. Further, the independence from pre- and/or co-stimulation of the effector cell may substantially contribute to the exceptionally high cytotoxicity mediated by the released, fused AF1 and AF2 antigen binding fragments. In some embodiments, the released AF1 and AF2, wherein the AF1 remains fused to the AF2 by a linker peptide, is designed with binding specificities such that it has the capability to bind and link together in close proximity cytotoxic effector cells (e.g., T cells, NK cells, cytokine induced killer cell (CIK cell)), to preselected target cell markers by the AF2 that has binding specificity to target cell markers associated with tumor cells, cancer cells, or cells associated with diseased tissues, thereby effecting an immunological synapse and a selective, directed, and localized effect of released cytokines and effector molecules against the target tumor or cancer cell, with the result that tumor or cancer cells are damaged or destroyed, resulting in therapeutic benefit to a subject. The released AF1 that binds to an effector cell antigen is capable of modulating one or more functions of an effector cell, resulting in or contributing to the cytolytic effect on the target cell to which the AF2 is bound; e.g., a tumor cell. The effector cell antigen can by expressed by the effector cell or other cells. In one embodiment, the effector cell antigen is expressed on cell surface of the effector cell. Non-limiting examples of effector cell antigens are CD3, CD4, CD8, CD16, CD25, CD38, CD45RO, CD56, CD57, CD69, CD95, CD107, and CD154. Thus, it will be understood by one of skill in the art that the configurations of the subject compositions are intended to selectively or disproportionately deliver the active form of the composition to the target tumor tissue or cancer cell, compared to healthy tissue or healthy cells in a subject in which the composition is administered, with resultant therapeutic benefit. As is evident from the foregoing, the disclosure provides a large family of polypeptides in designed configurations to effect the desired properties.

[0202] It is an object of the disclosure that the design of the subject bispecific antigen binding compositions, with the shielding effect imparted by the XTEN of the intact, circulating composition and the concomitant reduced potential to bind to effector cells and target tissues, results in reduced production of Th1 T-cell associated cytokines or other proinflammatory mediators during systemic exposure when administered to a subject such that the overall side-effect and safety profile (e.g., the therapeutic index) is improved compared to bispecific antigen binding compositions not linked to a shielding moiety such as an XTEN. As an important component of cellular immunity, the production of IL-2, TNF-alpha, and IFN-gamma are hallmarks of a Th1 response (Romagnani S. T-cell subsets (Th1 versus Th2). Ann Allergy Asthma Immunol. 2000. 85(1):9-18), particularly in T cells stimulated by anti-CD3 (Yoon, S. H. Selective addition of CXCR3+CCR4-CD4+ Th1 cells enhances generation of cytotoxic T cells by dendritic cells in vitro. Exp Mol Med. 2009. 41(3):161-170), and 11-4, IL-6, and IL-10 are also proinflammatory cytokines important in a cytotoxic response for bispecific antibody compositions (Zimmerman, Z., et al. Unleashing the clinical power of T cells: CD19/CD3 bi-specific T cell engager (BiTE®) antibody composition blinatumomab as a potential therapy. Int. Immunol. (2015) 27(1): 31-37). In one embodiment, an intact, uncleaved bispecific antigen binding composition of the embodiments described herein can exhibit at least 3-fold, or at least 4-fold, or at least 5-fold, or at least 6-fold, or at least 7-fold, or at least 8-fold, or at least 9-fold, or at least 10-fold, or at least 20-fold, or at least 30-fold, or at least 50-fold, or at least 100-fold, or at least 1000-fold reduced potential to result in the production of Th1 and/or proinflammatory cytokines when the intact, uncleaved polypeptide is in contact with the effector cell and a target cell in an in vitro cell-based cytokine stimulation assay compared to the Th1 and/or cytokine levels stimulated by the corresponding released AF1 and AF2 (which remain fused together after release by proteolysis of the RS) of a corresponding protease-treated composition in the in vitro cell-based stimulation cytokine assay performed under comparable conditions, e.g., equivalent molar concentrations. Non-limiting examples of Th1 and/or proinflammatory cytokines are IL-2, IL-4, IL-6, IL-10, TNF-alpha and IFN-gamma. In one embodiment of the foregoing, the production of the Th1 cytokine is assayed in an in vitro assay comprising effector cells such as PBMC or CD3+ T cells and target cells having a target cell marker antigen disclosed herein. In another embodiment, the cytokines can be assessed from a blood, fluid, or tissue sample removed from a subject in which the polypeptide composition has been administered. In the foregoing embodiment, the subject can be mouse, rat, monkey, and human. In an advantage of the subject bispecific antigen binding compositions of the embodiments described herein, however, it has been discovered that the cytolytic properties of the compositions do not require prestimulation by cytokines; that formation of the immunological synapse of the effector cell bound to the target cell by the antigen binding fragments is sufficient to effect cytolysis or apoptosis in the target cell. Nevertheless, the production of proinflammatory cytokines are useful markers to assess the potency or the effects of the subject polypeptide compositions; whether by in vitro assay or in the monitoring of treatment of a subject with a disease tissue (e.g., such as a tumor) after administration of a subject bispecific antigen binding composition.

[0203] In the context of use of the bispecific antigen binding compositions in a subject, in an object of the disclosure, the subject bispecific antigen binding compositions were designed to take advantage of the differential in pore size of the vasculature in tumor or inflamed tissues compared to healthy vasculature by the addition of the XTEN, such that extravasation of the intact bispecific antigen binding composition in normal tissue is reduced, but in the leaky environment of the tumor vasculature or other areas of inflammation in diseased tissues, the intact assembly can extravasate and be activated by the proteases in the diseased tissue environment, releasing the antigen binding fragments to the effector and target cells (see, e.g., FIG. 5). In the case of the RS of the bispecific antigen binding compositions, the design takes advantage of the circumstance that when a bispecific antigen binding composition is in proximity to diseased tissues; e.g., a tumor, that elaborates one or more proteases, the RS sequences that are susceptible to the one or more proteases expressed by the tumor are capable of being cleaved by the proteases (described more fully, above). The action of the protease cleaves the release segment (RS) of the composition, separating the antigen binding fragments from the XTEN, resulting in components with reduced molecular weight and hydrodynamic radii, particularly for the released fused AF1 and AF2. As will be appreciated, the decrease in molecular weight and hydrodynamic radius of the composition also confers the property that the released, fused AF1 and AF2 are able to more freely move in solution, move through smaller pore spaces in tissue and tumors, and extravasate more readily from the larger pores of the tumor vasculature and more readily penetrate into the tumor, resulting in an increased ability to attach to and link together the effector cell and the tumor cell. Such property can be measured by different assays. Thus, it will be appreciated by one of skill in the art that in the context of treatment of a subject using the subject compositions, the bispecific antigen binding compositions are present in a prodrug form and are converted to a more active form when entering a certain cellular environment by the action of proteases co-localized with the disease tissue or cell. Upon release from the composition by the action of the protease(s) in the target tissue, the AF1 with binding specificity to an effector cell antigen and the fused AF2 with binding specificity to an target cell marker antigen of a diseased cell regain their full capability to bind to and link together the effector cell to the target cell, forming an immunological synapse. The formation of the immunological synapse causes the effector cell to become activated, with various signal pathways turning on new gene transcription and the release, by exocytosis, the effector molecule contents of its vesicles. Depending on the type of effector cell, different cytokines and lymphokines are released; e.g., Type 1 helper T cells (Th1) release cytokines like IFN-gamma, IL-2 and TNF-alpha while Type 2 helper T cells (Th2) release cytokines like IL-4, IL-5, IL-10, and IL-13 that stimulate B cells, and cytotoxic T Lymphocytes (CTLs) release cytotoxic molecules like perforin and granzymes that kill the target (collectively, “effector molecules”). It is specifically contemplated that upon the concurrent binding to and linking together the effector cell to the target tumor cell by the released bispecific antigen binding fragments of the bispecific antigen binding composition, at very low effector to target (E:T) ratios the tumor cell is acted upon by the effector molecules released by the effector cell into the immunological synapse between the cells, resulting in damage, perforin-mediated lysis, granzyme B-induced cell death and/or apoptosis of the tumor cell. Thus, in another aspect, it is a feature of various designed compositions that when the activatable bispecific antigen binding fragment composition is administered to a subject with a disease such as a tumor, the prodrug form remains in the circulatory system in normal tissue but is able to extravasate in the more permeable vasculature of the tumor such that the prodrug form of the assembly is activated by the proteases co-localized with the tumor and that the released antigen binding fragments bind together and link an effector cell (e.g., a T cell) and a tumor cell expressing the target cell marker targeted by the AF2 of the composition, whereupon the effector cell is activated and lysis of the tumor cell is effected. Stated differently, in some cases, the more permeable vasculature in the tumor tissue may permit the bispecific antigen-binding polypeptide to extravasate into the tissue where the tumor-associated proteases can act on a release segment (RS), cleaving it and releasing the binding moieties, which in turn can bind to and link together the effector cell and the tumor associate cell. In the case of the normal tissue, the extravasation may be blocked by the tighter vasculature barriers or, in the case where the bispecific antigen binding polypeptide does extravasate to some extent, the bispecific antigen binding polypeptide may primarily remain in the “pro” form, as insufficient proteases may be present in the healthy tissue to release the binding moieties, with the net effect that an immunological synapse is not formed. In some cases, the released, fused AF1 and AF2 in the tumor of the subject bound to both a tumor cell and an effector cell exhibits an increased ability to activate effector cells of at least 10-fold, or at least 30-fold, or at least 100-fold, or at least 200-fold, or at least 300-fold, or at least 400-fold, or at least 500-fold, or at least 1000-fold compared to the corresponding intact, uncleaved bispecific antigen binding composition. In other cases, the released, linked AF1 and AF2 in the tumor of the subject bound to both a tumor cell and an effector cell exhibits an increased ability to lyse the tumor cell of at least 10-fold, or at least 30-fold, or at least 100-fold, or at least 200-fold, or at least 300-fold, or at least 400-fold, or at least 500-fold, or at least 1000-fold compared to the corresponding intact bispecific antigen binding composition that has not been cleaved in the tumor. In the foregoing embodiments, the effector cell activation and/or the cytotoxicity can be assayed by conventional methods known in the art, such as cytometric measurement of activated effector cells, assay of cytokines, measurement of tumor size, or by histopathology. In the foregoing embodiments, the subject can be mouse, rat, dog, monkey, and human. In particular, it is specifically contemplated that the subject compositions are designed such that upon administration to a subject with a disease having a target cell marker to which the AF2 can bind, the bispecific antigen binding composition exhibits an enhanced therapeutic index and reduced incidence of side effects, compared to conventional bispecific antibodies known in the art, achieved by a combination of the shielding effect and steric hindrance of XTEN on binding affinity over the antigen binding fragments in the prodrug form, yet are able to release the bispecific AF1 and AF2 (achieved by inclusion of the cleavage sequences in the RS) in proximity to or within a target tissue (e.g., a tumor) that produces a protease for which the RS is a substrate.

### VII). Methods and Uses of Bispecific Antigen Binding Compositions

[0204] In another aspect, the present disclosure provides activatable bispecific antigen binding compositions and pharmaceutical compositions comprising a bispecific antigen binding composition that are particularly useful in medical settings; for example, in the prevention, treatment and/or the amelioration of certain diseases such as, but not limited to, cancers, tumors or inflammatory diseases. For use of treatment of diseases, bispecific antigen binding compositions of the invention would be formulated, dosed, and administered in a fashion consistent with good medical practice. Factors for consideration in this context include the particular disorder being treated, the particular mammal being treated, the clinical condition of the individual patient, the cause of the disorder, the site of delivery of the agent, the method of administration, the scheduling of administration, and other factors known to medical practitioners.

[0205] A number of therapeutic strategies have been used to design the polypeptide compositions for use in methods of treatment of a subject with a cancerous disease, including the modulation of T cell responses by targeting TcR signaling, particularly using VL and VH portions of anti-human CD3 monoclonal antibodies that are widely used clinically in immunosuppressive regimes. The CD3-specific monoclonal OKT3 was the first such monoclonal approved for use in humans (Sgro, Toxicology 105 (1995), 23-29) and is widely used clinically as an immunosuppressive agent in transplantation (Chatenoud L: Immunologic monitoring during OKT3 therapy. Clin Transplant 7:422-430, 1993). Moreover, anti-CD3 monoclonals can induce partial T cell signaling and clonal anergy (Smith, J. Exp. Med. 185 (1997), 1413-1422). The OKT3 reacts with and blocks the function of the CD3 complex in the membrane of T cells; the CD3 complex being associated with the antigen recognition structure of T cells (TCR), which is essential for signal transduction. These and other such CD3 specific antibodies are able to induce various T cell responses, including cytokine production (Von Wussow, Human gamma interferon production by leukocytes induced with monoclonal antibodies recognizing T cells. J. Immunol. 127:1197-1200 (1981)), proliferation and suppressor T-cell induction. In cancer, attempts have been made to utilize cytotoxic T cells to lyse cancer cells. Without being bound by theory, to effect target cell lysis, cytotoxic T cells are believed to require direct cell-to-cell contact; the TCR on the cytotoxic T cell must recognize and engage the appropriate antigen on the target cell. This creates the immunologic synapse that, in turn initiates a signaling cascade within the cytotoxic T cell, causing T-cell activation and the production of a variety of cytotoxic cytokines and effector molecules. Perforin and granzymes are highly toxic molecules that are stored in preformed granules that reside in activated cytotoxic T cells. After recognition of the target cell, the cytoplasmic granules of the engaged cytotoxic T cells migrate toward the cytotoxic T-cell membrane, ultimately fusing with it and releasing their contents in directed fashion into the immunological synapse to form a pore within the membrane of the target cell, disrupting the tumor cell plasma membrane. The created pore acts as a point of entry for granzymes; a family of serine proteases that that induce apoptosis of the tumor cells.

[0206] The subject bispecific antigen binding compositions described herein, with an AF1 with specific binding affinity to the CD3 of a T cell closely fused to an AF2 with specific binding affinity to a target cell marker are T-cell engagers with the ability, once released from the intact prodrug form of the composition by cleavage of the release segments, regain their full potential to bind a T cell and target cell, forming an immunological synapse that promotes activation of the T-cell and promotes the subsequent destruction of the tumor cell via apoptosis or cytolysis.

[0207] The disclosure contemplates methods of use of bispecific antigen binding compositions that are engineered to target a range of malignant cells, such as tumors, in addition to the effector cells, in order to initiate target cell lysis and to effect a beneficial therapeutic outcome in that the bispecific antigen binding compositions are designed such that the AF1 binds and engages CD3 to activate the cytotoxic T cell while the AF2 can be designed to target a variety of different target cell markers that are characteristic of specific malignancies; bridging them together for the creation of the immunological synapse. In a particular advantage of the design, the physical binding of the cytotoxic effector cell and the cell bearing the target cell marker eliminates the need for antigen processing, MHCI/ß2-microglobulin, as well as co-stimulatory molecules. Examples of important target cell markers include but are not limited to the markers disclosed herein. Because of the range of such target cell markers (more extensively described, above) that can be engineered into the various embodiments of the subject bispecific antigen binding compositions, it will be appreciated that the resulting compositions will have utility against a variety of diseases, including hematological cancers and solid tumors. In one embodiment, the disclosure provides a method of treatment of a subject with a tumor. The tumor being treated can comprise tumor cells arising from a cell selected from the group consisting of stromal cell, fibroblasts, myofibroblasts, glial cells, epithelial cells, fat cells, lymphocytic cells, vascular cells, smooth muscle cells, mesenchymal cells, breast tissue cells, prostate cells, kidney cells, brain cells, colon cells, ovarian cells, uterine cells, bladder cells, skin cells, stomach cells, genito-urinary tract cells, cervix cells, uterine cells, small intestine cells, liver cells, pancreatic cells, gall bladder cells, bile duct cells, esophageal cells, salivary gland cells, lung cells, and thyroid cells. In a further advantage of the compositions, as the cytotoxic effector cells are not consumed during the damage/destruction of the bridged target cancer cell, after causing lysis of one target cell, an activated effector cell can release and move on through the local tissue towards other target cancer cells, bind again to the AF1-AF2 and the target antigen, and initiate additional cell lysis. In addition, it is contemplated that in a localized environment like a solid tumor, the release of effector cell molecules such as perform and granzymes will result in damage to tumor cells that are adjacent but not bound by a given molecule of the bispecific binding domains, resulting in stasis of growth or regression of the tumor.

[0208] Accordingly, a utility of the disclosure will be understood that after administration of a therapeutically effective dose of pharmaceutical composition comprising a bispecific antigen binding composition described herein to a subject with a cancer or tumor having the target cell marker, the composition can be acted upon by proteases in association with or co-localized with the cancer or tumor cells, releasing the fused AF1 and AF2 such that an immunological synapse can be created by the linking of the target cell and a effector cell, with the result that effector cell-derived effector molecules capable of lysing the target cell are released into the synapse, leading to apoptosis, cytolysis, or death of the target cancer or tumor cell. Furthermore, it will be appreciated by one of skill in the art that use of the bispecific antigen binding compositions can result in a sustained and more generalized beneficial therapeutic effect than a “single kill” once the immunological synapse is formed by the binding of the released binding domains to the effector cell and target cancer cell.

[0209] In one aspect, the disclosure relates to methods of treating a disease in a subject, such as a cancer or an inflammatory disorder. In some embodiments, the disclosure provides a method of treating a disease in a subject, comprising administering to the subject in need thereof a therapeutically effective amount of a pharmaceutical composition comprising a bispecific antigen binding composition of any of the embodiments described herein. A therapeutically effective amount of the pharmaceutical composition may vary according to factors such as the disease state, age, sex, and weight of the individual, and the ability of the antibody or antibody portion to elicit a desired response in the individual. A therapeutically effective amount is also one in which any toxic or detrimental effects of the subject compositions are outweighed by the therapeutically beneficial effects. A prophylactically effective amount refers to an amount of pharmaceutical composition required for the period of time necessary to achieve the desired prophylactic result.

[0210] A therapeutically effective dose of the bispecific antigen binding compositions described herein will generally provide therapeutic benefit without causing substantial toxicity. Toxicity and therapeutic efficacy of a bispecific antigen binding composition can be determined by standard pharmaceutical procedures in cell culture or experimental animals. Cell culture assays and animal studies can be used to determine the LD₅₀ (the dose lethal to 50% of a population) and the ED₅₀ (the dose therapeutically effective in 50% of a population). The dose ratio between toxic and therapeutic effects is the therapeutic index, which can be expressed as the ratio LD₅₀/ED₅₀. Bispecific antigen binding compositions that exhibit large therapeutic indices are preferred. In one aspect, the bispecific antigen binding molecule according to the present disclosure exhibits a high therapeutic index. The data obtained from cell culture assays and animal studies can be used in formulating a range of dosages suitable for use in humans. The dosage lies preferably within a range of circulating concentrations that include the ED₅₀ with little or no toxicity. The dosage may vary within this range depending upon a variety of factors, e.g., the dosage form employed, the route of administration utilized, the condition of the subject, and the like. The exact formulation, route of administration and dosage can be chosen by the individual physician in view of the patient's condition (see, e.g., Fingl et al., 1975, in: The Pharmacological Basis of Therapeutics, Ch. 1, p. 1). A skilled artisan readily recognizes that in many cases the bispecific antigen binding composition may not provide a cure but may only provide partial benefit. In some aspects, a physiological change having some benefit is also considered therapeutically beneficial. Thus, in some aspects, an amount of bispecific antigen binding composition that provides a physiological change is considered an “effective amount” or a “therapeutically effective amount”. The subject, patient, or individual in need of treatment is typically a mouse, rat, dog, monkey, or a human.

[0211] The bispecific antigen binding compositions of the invention may be administered in combination with one or more other agents in therapy. For instance, a bispecific antigen binding molecule of any of the embodiments described herein may be co-administered with at least one additional therapeutic agent. The term “therapeutic agent” encompasses any agent administered to treat a symptom or disease in an individual in need of such treatment. Such additional therapeutic agent may comprise any active ingredients suitable for the particular indication being treated, preferably those with complementary activities that do not adversely affect each other. In certain aspects, an additional therapeutic agent is an immunomodulatory agent, an immuno-oncologic antibody, a cytostatic agent, an inhibitor of cell adhesion, a cytotoxic agent, an activator of cell apoptosis, or an agent that increases the sensitivity of cells to apoptotic inducers. In a particular aspect, the additional therapeutic agent is an anti-cancer agent, for example a microtubule disruptor, an antimetabolite, a topoisomerase inhibitor, a DNA intercalator, an alkylating agent, a hormonal therapy, a kinase inhibitor, a receptor antagonist, an activator of tumor cell apoptosis, or an antiangiogenic agent.

[0212] In one embodiment of the method of treating a disease in a subject, the disease for treatment can be carcinomas, Hodgkin's lymphoma, non-Hodgkin's lymphoma, B cell lymphoma, diffuse large B cell lymphoma, T-cell lymphoma, follicular lymphoma, mantle cell lymphoma, blastoma, breast cancer, colon cancer, prostate cancer, head and neck cancer, any form of skin cancer, melanoma, genito-urinary tract cancer, ovarian cancer, ovarian cancer with malignant ascites, vaginal cancer, vulvar cancer, Ewing sarcoma, peritoneal carcinomatosis, uterine serous carcinoma, parathyroid cancer, endometrial cancer, cervical cancer, colorectal cancer, an epithelia intraperitoneal malignancy with malignant ascites, uterine cancer, mesothelioma in the peritoneum kidney cancers, lung cancer, laryngeal cancer, small-cell lung cancer, non-small cell lung cancer, gastric cancer, esophageal cancer, stomach cancer, small intestine cancer, liver cancer, hepatocarcinoma, retinoblastoma, hepatoblastoma, liposarcoma, pancreatic cancer, gall bladder cancer, testicular cancer, cancers of the bile duct, cancers of the bone, salivary gland carcinoma, thyroid cancer, craniopharyngioma, carcinoid tumor, epithelial cancer, arrhenoblastoma, adenocarcinoma, sarcomas of any origin, primary hematologic malignancies including acute or chronic lymphocytic leukemias, acute or chronic myelogenous leukemias, B-cell derived chronic lymphatic leukemia, hairy cell leukemia, myeloproliferative neoplastic disorders, or myelodysplastic disorders, myasthenia gravis, Morbus Basedow, Kaposi sarcoma, neuroblastoma, Hashimoto thyroiditis, Wilms tumor, or Goodpasture syndrome. The therapeutically effective amount can produce a beneficial effect in helping to treat (e.g., cure or reduce the severity) or prevent (e.g., reduce the likelihood of recurrence) of a cancer or a tumor. In another embodiment of the method of treating the disease in a subject, the pharmaceutical composition is administered to the subject as two or more therapeutically effective doses administered twice weekly, once a week, every two weeks, every three weeks, every four weeks, or monthly. In another embodiment of the method, the pharmaceutical composition is administered to the subject as two or more therapeutically effective doses over a period of at least two weeks, or at least one month, or at least two months, or at least three months, or at least four months, or at least five months, or at least six months. In another embodiment of the method, a first low priming dose is administered to the subject, followed by one or more higher maintenance doses over the dosing schedule of at least two weeks, or at least one month, or at least two months, or at least three months, or at least four months, or at least five months, or at least six months. The initial priming dose administered is selected from the group consisting of at least about 0.005 mg/kg, at least about 0.01 mg/kg, at least about 0.02 mg/kg, at least about 0.04 mg/kg, at least about 0.08 mg/kg, at least about 0.1 mg/kg, and one or more subsequent maintenance dose(s) administered is selected from the group consisting of at least about 0.02 mg/kg, at least about 0.05 mg/kg, at least about 0.1 mg/kg, at least about 0.16 mg/kg, at least about 0.18 mg/kg, at least about 0.20 mg/kg, at least about 0.22 mg/kg, at least about 0.24 mg/kg, at least about 0.26 mg/kg, at least about 0.27 mg/kg, at least about 0.28 mg/kg, at least 0.3 mg/kg, at least 0.4. mg/kg, at least about 0.5 mg/kg, at least about 0.6 mg/kg, at least about 0.7 mg/kg, at least about 0.8 mg/kg, at least about 0.9 mg/kg, at least about 1.0 mg/kg, at least about 1.5 mg/kg, or at least about 2.0 mg/kg, or at least 5.0 mg/kg. In another embodiment of the method, the pharmaceutical composition is administered to the subject intradermally, subcutaneously, intravenously, intra-arterially, intra-abdominally, intraperitoneally, intrathecally, or intramuscularly. In another embodiment of the method, the pharmaceutical composition is administered to the subject as one or more therapeutically effective bolus doses or by infusion of 5 minutes to 96 hours as tolerated for maximal safety and efficacy. In another embodiment of the method, the pharmaceutical composition is administered to the subject as one or more therapeutically effective bolus doses or by infusion of 5 minutes to 96 hours, wherein the dose is selected from the group consisting of at least about 0.005 mg/kg, at least about 0.01 mg/kg, at least about 0.02 mg/kg, at least about 0.04 mg/kg, at least about 0.08 mg/kg, at least about 0.1 mg/kg, at least about 0.12 mg/kg, at least about 0.14 mg/kg, at least about 0.16 mg/kg, at least about 0.18 mg/kg, at least about 0.20 mg/kg, at least about 0.22 mg/kg, at least about 0.24 mg/kg, at least about 0.26 mg/kg, at least about 0.27 mg/kg, at least about 0.28 mg/kg, at least 0.3 mg/kg, at least 0.4. mg/kg, at least about 0.5 mg/kg, at least about 0.6 mg/kg, at least about 0.7 mg/kg, at least about 0.8 mg/kg, at least about 0.9 mg/kg, at least about 1.0 mg/kg, at least about 1.5 mg/kg, or at least about 2.0 mg/kg, or at least about 5.0 mg/kg. In another embodiment of the method, the pharmaceutical composition is administered to the subject as one or more therapeutically effective bolus doses or by infusion over a period of 5 minutes to 96 hours, wherein the administration to the subject results in a Cmax plasma concentration of the intact, uncleaved bispecific antigen binding composition of at least about 0.1 ng/mL to at least about 2 μg/mL or more in the subject that is maintained for at least about 3 days, at least about 7 days, at least about 10 days, at least about 14 days, or at least about 21 days. The therapeutically effective dose is at least about 0.005 mg/kg, at least about 0.01 mg/kg, at least about 0.02 mg/kg, at least about 0.04 mg/kg, at least about 0.08 mg/kg, at least about 0.1 mg/kg, at least about 0.12 mg/kg, at least about 0.14 mg/kg, at least about 0.16 mg/kg, at least about 0.18 mg/kg, at least about 0.20 mg/kg, at least about 0.22 mg/kg, at least about 0.24 mg/kg, at least about 0.26 mg/kg, at least about 0.27 mg/kg, at least about 0.28 mg/kg, at least 0.3 mg/kg, at least 0.4 mg/kg, at least about 0.5 mg/kg, at least about 0.6 mg/kg, at least about 0.7 mg/kg, at least about 0.8 mg/kg, at least about 0.9 mg/kg, at least about 1.0 mg/kg, at least about 1.5 mg/kg, or at least about 2.0 mg/kg. In one embodiment, an initial dose is selected from the group consisting of at least about 0.005 mg/kg, at least about 0.01 mg/kg, at least about 0.02 mg/kg, at least about 0.04 mg/kg, at least about 0.08 mg/kg, at least about 0.1 mg/kg, and a subsequent dose is selected from the group consisting of at least about 0.1 mg/kg, at least about 0.12 mg/kg, at least about 0.14 mg/kg, at least about 0.16 mg/kg, at least about 0.18 mg/kg, at least about 0.20 mg/kg, at least about 0.22 mg/kg, at least about 0.24 mg/kg, at least about 0.26 mg/kg, at least about 0.27 mg/kg, at least about 0.28 mg/kg, at least 0.3 mg/kg, at least 0.4. mg/kg, at least about 0.5 mg/kg, at least about 0.6 mg/kg, at least about 0.7 mg/kg, at least about 0.8 mg/kg, at least about 0.9 mg/kg, at least about 1.0 mg/kg, at least about 1.5 mg/kg, or at least about 2.0 mg/kg. In the foregoing embodiments, the administration to the subject results in a plasma concentration of the polypeptide of at least about 0.1 ng/mL to at least about 2 ng/mL or more in the subject for at least about 3 days, at least about 7 days, at least about 10 days, at least about 14 days, or at least about 21 days. In the foregoing embodiments of the method, the subject can be a mouse, rat, dog, monkey, or a human.

### VIII). Nucleic Acid Sequences

[0213] In another aspect, the present invention relates to isolated polynucleotide sequences encoding the polypeptides or bispecific antigen binding compositions of any of the embodiments described herein and sequences complementary to polynucleotide molecules encoding the polypeptide composition embodiments.

[0214] In some embodiments, the invention provides isolated polynucleotide sequences encoding the AF1 sequences, or the AF2 sequences, or the release segment sequences (RS1 and RS2), or the XTEN sequences of any of the embodiments described herein, or the complement of the polynucleotide sequences. In one embodiment, the invention provides an isolated polynucleotide sequence encoding a polypeptide or bispecific antigen binding composition of any of the embodiments described herein, or the complement of the polynucleotide sequence. In one embodiment, the invention provides an isolated polynucleotide sequence encoding a polypeptide or bispecific antigen binding composition wherein the polynucleotide sequence has at least 90%, 91%, 92%, 93%, 94%, 95%, 96%, 97%, 98%, 99%, or 100% sequence identity to a polynucleotide sequence set forth in Table 9.

[0215] In another aspect, the disclosure relates to methods to produce polynucleotide sequences encoding the polypeptides or bispecific antigen binding compositions of any of the embodiments described herein, or sequences complementary to the polynucleotide sequences, including homologous variants thereof, as well as methods to express the proteins expressed by the polynucleotide sequences. In general, the methods include producing a polynucleotide sequence coding for the proteinaceous polypeptides or bispecific antigen binding compositions of any of the embodiments described herein and incorporating the encoding gene into an expression vector appropriate for a host cell. For production of the encoded polypeptides or bispecific antigen binding compositions of any of the embodiments described herein, the method includes transforming an appropriate host cell with the expression vector, and culturing the host cell under conditions causing or permitting the resulting polypeptide or bispecific antigen binding composition of any of the embodiments described herein to be expressed in the transformed host cell, thereby producing the polypeptide or bispecific antigen binding composition, which is recovered by methods described herein or by standard protein purification methods known in the art. Standard recombinant techniques in molecular biology are used to make the polynucleotides and expression vectors of the present disclosure.

[0216] In accordance with the disclosure, nucleic acid sequences that encode the polypeptides or bispecific antigen binding compositions of any of the embodiments described herein (or their complement) are used to generate recombinant DNA molecules that direct the expression in appropriate host cells. Several cloning strategies are suitable for performing the present disclosure, many of which are used to generate a construct that comprises a gene coding for a composition of the present disclosure, or its complement. In one embodiment, the cloning strategy is used to create a gene that encodes a construct that comprises nucleotides encoding the polypeptide or bispecific antigen binding composition that is used to transform a host cell for expression of the composition. In the foregoing embodiments hereinabove described in this paragraph, the genes can comprise nucleotides encoding the antigen binding fragments, release segments, and the XTEN in the configurations disclosed herein.

[0217] In one approach, a construct is first prepared containing the DNA sequence encoding a polypeptide or bispecific antigen binding composition construct. Exemplary methods for the preparation of such constructs are described in the Examples. The construct is then used to create an expression vector suitable for transforming a host cell, such as a prokaryotic or eukaryotic host cell for the expression and recovery of the polypeptide construct. Where desired, the host cell is an E. coli. In another embodiment, the host cell is selected from BHK cells, NS0 cells, SP2/0 cells, YO myeloma cells, P3X63 mouse myeloma cells, PER cells, PER.C6 cells, hybridoma cells, NIH3T3 cells, COS, HeLa, CHO, or yeast cells. Exemplary methods for the creation of expression vectors, the transformation of host cells and the expression and recovery of XTEN are described in the Examples.

[0218] The gene encoding for the polypeptide or bispecific antigen binding composition construct can be made in one or more steps, either fully synthetically or by synthesis combined with enzymatic processes, such as restriction enzyme-mediated cloning, PCR and overlap extension, including methods more fully described in the Examples. The methods disclosed herein can be used, for example, to ligate sequences of polynucleotides encoding the various components (e.g., binding domains, linkers, release segments, and XTEN) genes of a desired length and sequence. Genes encoding polypeptide compositions are assembled from oligonucleotides using standard techniques of gene synthesis. The gene design can be performed using algorithms that optimize codon usage and amino acid composition appropriate for the E. coli or mammalian host cell utilized in the production of the polypeptide or bispecific antigen binding composition. In one method of the disclosure, a library of polynucleotides encoding the components of the constructs is created and then assembled, as described above. The resulting genes are then assembled, and the resulting genes used to transform a host cell and produce and recover the polypeptide compositions for evaluation of its properties, as described herein.

[0219] The resulting polynucleotides encoding the polypeptide or bispecific antigen binding composition sequences can then be individually cloned into an expression vector. The nucleic acid sequence is inserted into the vector by a variety of procedures. In general, DNA is inserted into an appropriate restriction endonuclease site(s) using techniques known in the art. Vector components generally include, but are not limited to, one or more of a signal sequence, an origin of replication, one or more marker genes, an enhancer element, a promoter, and a transcription termination sequence. Construction of suitable vectors containing one or more of these components employs standard ligation techniques which are known to the skilled artisan. Such techniques are well known in the art and well described in the scientific and patent literature. Various vectors are publicly available. The vector may, for example, be in the form of a plasmid, cosmid, viral particle, or phage that may conveniently be subjected to recombinant DNA procedures, and the choice of vector will often depend on the host cell into which it is to be introduced. Thus, the vector may be an autonomously replicating vector, i.e., a vector, which exists as an extrachromosomal entity, the replication of which is independent of chromosomal replication, e.g., a plasmid. Alternatively, the vector may be one which, when introduced into a host cell, is integrated into the host cell genome and replicated together with the chromosome(s) into which it has been integrated. Once introduced into a suitable host cell, expression of the antigen binding fragments or bispecific antigen binding compositions can be determined using any nucleic acid or protein assay known in the art. For example, the presence of transcribed mRNA of light chain CDRs or heavy chain CDRs, the antigen binding fragment, or the bispecific antigen binding composition can be detected and/or quantified by conventional hybridization assays (e.g. Northern blot analysis), amplification procedures (e.g. RT-PCR), SAGE (U.S. Pat. No. 5,695,937), and array-based technologies (see e.g. U.S. Pat. Nos. 5,405,783, 5,412,087 and 5,445,934), using probes complementary to any region of antigen binding unit polynucleotide.

[0220] The disclosure provides for the use of plasmid expression vectors containing replication and control sequences that are compatible with and recognized by the host cell and are operably linked to the gene encoding the polypeptide for controlled expression of the polypeptide. The vector ordinarily carries a replication site, as well as sequences that encode proteins that are capable of providing phenotypic selection in transformed cells. Such vector sequences are well known for a variety of bacteria, yeast, and viruses. Useful expression vectors that can be used include, for example, segments of chromosomal, non-chromosomal and synthetic DNA sequences. “Expression vector” refers to a DNA construct containing a DNA sequence that is operably linked to a suitable control sequence capable of effecting the expression of the DNA encoding the polypeptide in a suitable host. The requirements are that the vectors are replicable and viable in the host cell of choice. Low- or high-copy number vectors may be used as desired.

[0221] Suitable vectors include, but are not limited to, derivatives of SV40 and pcDNA and known bacterial plasmids such as col EI, pCR1, pBR322, pMal-C2, pET, pGEX as described by Smith, et al., Gene 57:31-40 (1988), pMB9 and derivatives thereof, plasmids such as RP4, phage DNAs such as the numerous derivatives of phage I such as NM98 9, as well as other phage DNA such as M13 and filamentous single stranded phage DNA; yeast plasmids such as the 2 micron plasmid or derivatives of the 2m plasmid, as well as centomeric and integrative yeast shuttle vectors; vectors useful in eukaryotic cells such as vectors useful in insect or mammalian cells; vectors derived from combinations of plasmids and phage DNAs, such as plasmids that have been modified to employ phage DNA or the expression control sequences; and the like. Yeast expression systems that can also be used in the present disclosure include, but are not limited to, the non-fusion pYES2 vector (Invitrogen), the fusion pYESHisA, B, C (Invitrogen), pRS vectors and the like. The control sequences of the vector include a promoter to effect transcription, an optional operator sequence to control such transcription, a sequence encoding suitable mRNA ribosome binding sites, and sequences that control termination of transcription and translation. The promoter may be any DNA sequence, which shows transcriptional activity in the host cell of choice and may be derived from genes encoding proteins either homologous or heterologous to the host cell. Promoters suitable for use in expression vectors with prokaryotic hosts include the β-lactamase and lactose promoter systems [Chang et al., Nature, 275:615 (1978); Goeddel et al., Nature, 281:544 (1979)], alkaline phosphatase, a tryptophan (trp) promoter system [Goeddel, Nucleic Acids Res., 8:4057 (1980); EP 36,776], and hybrid promoters such as the tac promoter [deBoer et al., Proc. Natl. Acad. Sci. USA, 80:21-25 (1983)], all is operably linked to the DNA encoding XTEN polypeptides. Promoters for use in bacterial systems can also contain a Shine-Dalgarno (S.D.) sequence, operably linked to the DNA encoding polypeptide polypeptides.

[0222] Expression of the vector can also be determined by examining the antigen binding fragment or a component of the bispecific antigen binding composition expressed. A variety of techniques are available in the art for protein analysis. They include but are not limited to radioimmunoassays, ELISA (enzyme linked immunoradiometric assays), “sandwich” immunoassays, immunoradiometric assays, in situ immunoassays (using e.g., colloidal gold, enzyme or radioisotope labels), western blot analysis, immunoprecipitation assays, immunofluorescent assays, and SDS-PAGE.

### IX). Methods of Making the Polypeptides and Bispecific Antigen Binding Compositions

[0223] In another aspect, the disclosure provides methods of manufacturing the subject compositions. In one embodiment, the method comprises culturing a host cell comprising a nucleic acid construct that encodes a polypeptide or a bispecific antigen binding composition of any of the embodiments described herein under conditions that promote the expression of the polypeptide or bispecific antigen binding composition, followed by recovery of the polypeptide or bispecific antigen binding composition using standard purification methods (e.g., column chromatography, HPLC, and the like) wherein the composition is recovered wherein at least 70%, or at least 80%, or at least 90%, or at least 95%, or at least 97%, or at least 99% of the binding fragments of the expressed polypeptide or bispecific antigen binding composition are correctly folded. In another embodiment of the method of making, the expressed polypeptide or bispecific antigen binding composition is recovered in which at least or at least 90%, or at least 95%, or at least 97%, or at least 99% of the polypeptide or bispecific antigen binding composition is recovered in monomeric, soluble form.

[0224] In another aspect, the disclosure relates to methods of making the polypeptide and bispecific antigen binding compositions at high fermentation expression levels of functional protein using an E. coli or mammalian host cell, as well as providing expression vectors encoding the constructs useful in methods to produce the cytotoxically active polypeptide construct compositions at high expression levels. In one embodiment, the method comprises the steps of 1) preparing the polynucleotide encoding the polypeptides of any of the embodiments disclosed herein, 2) cloning the polynucleotide into an expression vector, which can be a plasmid or other vector under control of appropriate transcription and translation sequences for high level protein expression in a biological system, 3) transforming an appropriate host cell with the expression vector, and 4) culturing the host cell in conventional nutrient media under conditions suitable for the expression of the polypeptide composition. Where desired, the host cell is E. coli. By the method, the expression of the polypeptide results in fermentation titers of at least 0.05 g/L, or at least 0.1 g/L, or at least 0.2 g/L, or at least 0.3 g/L, or at least 0.5 g/L, or at least 0.6 g/L, or at least 0.7 g/L, or at least 0.8 g/L, or at least 0.9 g/L, or at least 1 g/L of the expression product of the host cell and wherein at least 70%, or at least 80%, or at least 90%, or at least 95%, or at least 97%, or at least 99% of the expressed protein are correctly folded. As used herein, the term “correctly folded” means that the antigen binding fragments component of the composition have the ability to specifically bind its target ligand. In another embodiment, the disclosure provides a method for producing a polypeptide or bispecific antigen binding composition, the method comprising culturing in a fermentation reaction a host cell that comprises a vector encoding a polypeptide comprising the polypeptide or bispecific antigen binding composition under conditions effective to express the polypeptide product at a concentration of more than about 10 milligrams/gram of dry weight host cell (mg/g), or at least about 250 mg/g, or about 300 mg/g, or about 350 mg/g, or about 400 mg/g, or about 450 mg/g, or about 500 mg/g of said polypeptide when the fermentation reaction reaches an optical density of at least 130 at a wavelength of 600 nm, and wherein the antigen binding fragments of the expressed protein are correctly folded. In another embodiment, the disclosure provides a method for producing a polypeptide or bispecific antigen binding composition, the method comprising culturing in a fermentation reaction a host cell that comprises a vector encoding the composition under conditions effective to express the polypeptide product at a concentration of more than about 10 milligrams/gram of dry weight host cell (mg/g), or at least about 250 mg/g, or about 300 mg/g, or about 350 mg/g, or about 400 mg/g, or about 450 mg/g, or about 500 mg/g of said polypeptide when the fermentation reaction reaches an optical density of at least 130 at a wavelength of 600 nm, and wherein the expressed polypeptide product is soluble.

[0225] The following are examples of compositions and evaluations of compositions of the disclosure. It is understood that various other embodiments may be practiced, given the general description provided above.

### EXAMPLES

### Example 1: Construction of Bispecific Antigen Binding Polypeptides with Two Release Segments

[0226] In order to generate a plasmid where the individual scFvs can be removed by restriction digest, pCW1700, which encodes for an anti-EpCAM-anti-CD3 (UCHT1) bispecific tandem scFv, with an RSR2486 release segment, an AE866 XTEN and a 6×His tag affinity tag (SEQ ID NO: 1150), was digested with SacII and BstXI, removing the 3′ end of the anti-EpCAM binding domain, the linker between the anti-EpCAM and anti-CD3 domains and the 5′ end of the anti-CD3 domain. A fragment of DNA encoding the same region was synthesized with silent point mutations at the junction between the anti-EpCAM binding domain and the linker to introduce a Bsu36I site. Synthetic DNA fragments were cloned into digested backbone using the In-Fusion kit (New England Biolabs) to assemble pJB0035. pJB0035 was subsequently digested with NheI and BsaI to remove the BSRS1 release segment sequence. Overlapping single stranded oligonucleotides encoding RSR2486 were synthesized with single stranded tails that anneal to the NheI and BsaI overhangs. The oligonucleotides were annealed together and ligated into the digested pJB0035, resulting in pCW1880, which encodes for an anti-EpCAM-anti-CD3 (UCHT1) bispecific tandem scFv, RSR2486, XTEN866 and a 6×His tag affinity tag (SEQ ID NO: 1150).

[0227] In order to generate plasmids with various CD3 binding domain variants, pCW1880 was digested with Bsu36I and NheI to remove the UCHT1 anti-CD3 scFv. DNA fragments encoding the designed CD3 variants were synthesized. Each gene fragment included 30 nucleotides 5′ and 3′ of the restriction sites to serve as DNA overlaps for Gibson DNA Assembly. Synthetic DNA fragments were cloned into digested backbone using the Gibson Cloning Kit (SGI-DNA, Carlsbad, Calif.) to assemble pJB0205, pJB0206, pJB0207 and pJB0208.

[0228] In order to generate a bispecific antigen binding polypeptide with both an N-terminal and C-terminal XTEN, the AE292 XTEN was PCR amplified from a plasmid using primers including a 17-21 bp 5′ homology region to backbone DNA on the N-terminus and to an uncleavable release segment (RSR3058, amino acid sequence TTGEAGEAAGATSAGATGP (SEQ ID NO: 100)) on the C-terminus. A second PCR product encoding the light and part of the heavy chain of the anti-EpCAM antibody 4D5MOCB was amplified using primers that included a 16-21 bp 5′ homology region to RSR3058 on the N-terminus and the heavy chain of 4D5MOCB on the C-terminus. These PCR fragments were cloned into a backbone vector digested with BsiWI-SacII that encoding the remainder of the 4D5MOCB heavy chain/anti-CD3 tandem scFv, a second copy of the RSR3058 uncleavable release segment and AE837 XTEN with a 6×HIS (SEQ ID NO: 1150) affinity tag using the In-Fusion Plasmid Assembly Kit (Takara Bio). The final vector encodes the bispecific antigen binding polypeptide with the components (in the N- to C-terminus) of AE292 XTEN, the uncleavable RSR3058 release segment, anti-EpCAM-anti-CD3 bispecific tandem scFv, with RSR3058 fused to AE867 XTEN with a 6×HIS (SEQ ID NO: 1150) affinity tag under the control of a PhoA promoter and STII secretion leader. The resulting construct is pJB0084 (Table 9).

[0229] pJB0084 was used as a template to create a bispecific antigen binding polypeptide construct encoding AE292 XTEN, the cleavable release segment RSR2295, anti-EpCAM-anti-CD3 bispecific tandem scFv, with RSR2295 fused to AE868 XTEN. The plasmid utilized two PCR products using pJB0084 as a template; the first encoding a 6×HIS (SEQ ID NO: 1150) affinity tag and AE292 XTEN with an 5′ homology region to the vector backbone and the 3′ homology region encoding the first RSR2295, the second encoding the anti-EpCAM-anti-CD3 bispecific tandem scFv with 5′ and 3′ homology regions encoding the RSR2295 release segments 5′ and 3′ of the tandem scFvs. The third fragment encoded AE868 XTEN having the C-Tag affinity tag (amino acid sequence EPEA (SEQ ID NO: 1149)) with a 5′ homology region encoding the second RSR2295 and a 3′ homology region to the backbone vector. The three PCR fragments were cloned into pJB0084 that had been digested with BsiWI-NotI using the In-Fusion Plasmid Assembly Kit. The final vector, pJB0169, encodes the bispecific antigen binding polypeptide molecule with the components (in the N- to C-terminus) of 6×HIS affinity tag (SEQ ID NO: 1150), AE292 XTEN, RSR2295 release segment, anti-EGFR-anti-CD3 bispecific tandem scFv, RSR2295, AE868 XTEN with the C-Tag affinity tag under the control of a PhoA promoter and STII secretion leader with the DNA sequence.

[0230] To construct pJB0163 and pJB0179, pJB0169 was digested with DraIII and BtsI to remove the 5′ RSR2295, anti-EGFR-anti-CD3 bispecific tandem scFv, RSR2295, and the first 72 amino acids of the AE868XTEN. For pJB0163, a fragment of DNA was synthesized encoding RSR3058, the anti-CD3 light chain, anti-EGFR light and heavy chain, the anti-CD3 heavy chain, RSR3058 and the first 72 amino acids of AE868 XTEN. For pJB0179, a fragment of DNA was synthesized encoding RSR2295, the anti-CD3 light chain, anti-EGFR light and heavy chain, the anti-CD3 heavy chain, RSR2295 and the first 72 amino acids of AE868 XTEN. The gene fragments also included 30 nucleotides 5′ and 3′ of the restriction sites to serve as DNA overlaps for Gibson DNA Assembly. Synthetic DNA fragments were cloned into the digested pJB0169 backbone using the Gibson Cloning Kit (SGI-DNA, Carlsbad, Calif.) to assemble pJB0163 and pJB0179.

[0231] pJB0179 was digested with BsaI and BbvCI to remove the anti-CD3 and anti-EGFR binding domain encoding sequences. A PCR product encoding an anti-HER2 light chain and heavy chain with primers including an 18 bp 5′ homology region to backbone DNA on the N-terminus and a 21 bp 3′ homology region to a second PCR product was amplified. A second PCR product encoding an anti-CD3 scFv sequence variant (CD3.23) with primers including an 18 bp 5′ homology region to the first PCR product on the N-terminus and a 23 bp 3′ homology region the vector backbone was amplified using pJB0205 as a template. The two PCR products were cloned into the digested backbone using the Gibson Cloning Kit (SGI-DNA, Carlsbad, Calif.) to assemble pAH0011.

[0232] pJB0163 was digested with BsaI and BstEII to remove the anti-CD3 and anti-EGFR binding domain encoding sequences. A PCR product encoding an anti-HER2 light chain and heavy chain with primers including an 18 bp 5′ homology region to backbone DNA on the N-terminus and a 21 bp 3′ homology region to a second PCR product was amplified. A second PCR product encoding an anti-CD3 scFv sequence variant (CD3.23) with primers including an 18 bp 5′ homology region to the first PCR product on the N-terminus and a 23 bp 3′ homology region the vector backbone was amplified using pJB0205 as a template. The two PCR products were cloned into the digested backbone using the Gibson Cloning Kit (SGI-DNA, Carlsbad, Calif.) to assemble pAH0013.

[0233] In order to generate pJB0244 and pJB0245, pAH0011 and pAH0013 were digested with BsaI and BsrDI to remove the anti-Her2 (Her2.1) light and heavy chains encoding sequences. PCR products encoding the anti-Her2 (Her2.2) light and heavy chains was amplified with primers including an 25 bp 5′ homology region to the 3′ end of the respective vector backbone on the N-terminus and a 25 bp 3′ homology region to the 5′ end of the vector backbone. The PCR product for pJB0244 was cloned into the digested pAH0011 backbone using the Gibson Cloning Kit (SGI-DNA, Carlsbad, Calif.) to assemble pJB0244, which encodes for a 6×HIS affinity tag (SEQ ID NO: 1150), AE292 XTEN, RSR2295, anti-HER2-anti-CD3 bispecific tandem scFv, RSR2295, AE868 XTEN868 having a C-Tag affinity tag under the control of a PhoA promoter and STII secretion leader with the DNA sequence and encoded amino acid sequence provided in Table 9. The PCR product for pJB0245 was cloned into the pAH0013 backbone to generate pJB0245, which encodes for a 6×HIS affinity tag (SEQ ID NO: 1150), AE292 XTEN, RSR3058 release segment, anti-HER2-anti-CD3 bispecific tandem scFv, RSR3058, AE868 XTEN having a C-Tag affinity tag under the control of a PhoA promoter and STII secretion leader.

[0234] In order to introduce a new CD3 scFv with alterations to the isoelectric point and removal of potential aggregation sites in the amino acid sequence, pJB0244 was digested with BsaI and BbvCI to remove both the HER2 and CD3 scFvs. DNA fragments encoding anti-EGFR scFv variants paired with CD3.33 were synthesized that included 40 bp of homology to the digested vector at both the 5′ and 3′ ends to facilitate Gibson DNA Assembly. Plasmids pJB0358-pJB0372 were assembled with the structure of 6×HIS affinity tag (SEQ ID NO: 1150), AE292 XTEN, RSR2295, and individually, a total of 15 anti-EGFR scFv variants paired with an anti-CD3 scFv, RSR2295, AE868 XTEN having a C-Tag affinity tag.

[0235] pAH0025 and pAH0026 were created by initially digesting pJB0368 and pJB0373 with BtsI to remove the anti-CD3 scFv. DNA fragments were ordered encoding the anti-CD3.32 scFv flanked with 40 bp homology regions to the digested backbone. These fragments were introduced into pJB0368 and pJB0373 by Gibson Assembly to create plasmids encoding a 6×HIS affinity tag (SEQ ID NO: 1150), AE292 XTEN, RSR2295, anti-EGFR-anti-CD3 bispecific tandem scFv, RSR2295, AE868 XTEN having a C-Tag affinity tag constructed with two different anti-EGFR binding domains, EGFR.23 and EGFR.2 to result in the pAH0025 and pAH0026 constructs with the DNA sequence and encoded amino acid sequence provided in Table 9.

[0236] To generate bispecific antigen binding polypeptide constructs with a shortened C-terminal XTEN, pJB0244 was digested with BtsI and EcoRI to remove the C-terminal XTEN and the C-tag. A PCR fragment encoding for an AE584 XTEN sequence and C-tag was amplified from pJB0244. A second fragment encoding vector backbone with 40 bp of homology past the EcoRI site was synthesized with a 34 base tail overlapping the first fragment. These two fragments were cloned into the digested pJB0244 backbone using the Gibson Assembly Kit to create plasmid pJB0354, which encodes a 6×HIS affinity tag (SEQ ID NO: 1150), AE292, RSR2295, anti-HER2-anti-CD3 bispecific tandem scFv, RSR2295, AE584 XTEN and a C-Tag affinity tag. To generate pJB0355, a PCR fragment encoding for an AE293 XTEN sequence and C-tag was amplified from pJB0244. This was cloned, along with the second fragment described above, into the digested pJB0244 backbone using the Gibson Assembly Kit to create plasmid pJB0355, which encodes a 6×HIS affinity tag (SEQ ID NO: 1150), XTEN292, RSR2295, anti-Her2-anti-CD3 bispecific tandem scFv, RSR2295, AE300 XTEN and a C-Tag affinity tag (DNA and amino acid sequences in Table 9). Uncleavable variants of pJB0354 and pJB0355 (pJB0377 and pJB0378 respectively) were also constructed substituting RSR2295 with the sequence EAGRSANHTPAGLTGP (SEQ ID NO: 88).

[0237] To generate protein with shortened N- and C-terminal XTENs, three PCR products were amplified. The first PCR product consisted of the N-terminal His tag and AE144_7A XTEN amplified from pCW1199. The second PCR products consisted of the N-terminal release site 2295, the anti-HER2-anti-CD3 bispecific tandem scFv, and the C-terminal release site 2295 and 286 amino acids of XTEN sequence. These two fragments were cloned into a backbone that was generated by PCR amplification that includes the last 17 XTEN amino acids on its 5′ end including 30 bp of homology to the second PCR product and the STII signal peptide, 6×His tag (SEQ ID NO: 1150) and 5 XTEN residues on its 3′ end, which includes 39 bp of homology to the 5′ end of the first PCR product via Gibson Assembly to form pJB0380. pJB0380 encodes for a 6×HIS affinity tag (SEQ ID NO: 1150), AE144_7A XTEN, RSR2295, anti-HER2-anti-CD3 bispecific tandem scFv, RSR2295, AE293 XTEN and a C-Tag affinity tag (DNA and amino acid sequences in Table 9). An uncleavable variants of pJB0380 (pJB0379) was also constructed substituting RSR2295 with the sequence EAGRSANHTPAGLTGP (SEQ ID NO: 88). The same methodologies would be employed to make constructs having CD3.24, CD3.30, CD3.31, CD3.33 scFv, and scFv for antigen binding fragments against target cell markers described herein, in any combination or orientation (i.e., AF1-AF2 or AF2-AF1 in an N- to C-terminal orientation).

Lengthy table referenced here
US20210054077A1-20210225-T00001
Please refer to the end of the specification for access instructions.

Lengthy table referenced here
US20210054077A1-20210225-T00002
Please refer to the end of the specification for access instructions.

### Example 2: Evaluation of CD3 scFv Sequence Variants in Comparison to Parental CD3 scFv

[0238] The purpose of the experiments was to evaluate four CD3 sequence variants to determine if the variants had enhanced properties in comparison to the CD3.9 parental scFv.

[0239] 1. Determination of Melting Temperature (Tₘ)

[0240] The melting temperature of each scFv variant was measured to determine its thermal stability. Briefly, a uniform quantity of scFv in 200 μL of 1% BSA-PBST was aliquoted into PCR tubes. Tubes were incubated for one hour at several different temperatures (50° C., 51.4° C., 53.7° C., 57.3° C., 61.7° C., 65.5° C., and 68° C.). 50 μL of each sample was added to an ELISA plate coated with CD3CEμ target antigen (Creative Biomart) or BSA (reference to address stickiness). The wells of the ELISA plate were prefilled with 1% BSA-PBST (50 μl/well). Plates were incubated for 1 hour at room temperature. Plates were washed three times with water with 0.05% TWEEN to remove unbound scFv. Bound scFv was detected by adding an anti-YOL antibody (Thermo Scientific # MA180189) (1:500 diluted in 1% BSA-PBST (0.05%)) that detects a porcine alpha-tubulin motif in the linker between the heavy and light chain. Samples were incubated at room temperature for 1 hour. Plates were washed three times with water with 0.05% TWEEN to remove unbound scFv. The anti-YOL antibody was detected by adding an anti-rat-HRP antibody (Thermo Scientific #31470) (1:7500 diluted in 1% BSA-PBST (0.05%)) [100 μl/well) and incubating at room temperature for 1 hour. Plates were washed three times with water with 0.05% TWEEN to remove unbound antibody. Plates were developed using TMB (3,3′,5,5′-tetramethylbenzidine) substrate (100 μL/well for 6 minutes at room temperature. The reactions were stopped with H2504 (0.5M, 100 μL/well). The relative activity was measured as the absorbance reading at 450 nM. The absorbance at each temperature was graphed. The melting temperature was determined to be the EC50 of each sample, the temperature at which the binding of the scFv was reduced to 50% of maximal signal. The results are presented in Table 11.

[0241] Results: The assay results demonstrate that the CD3 scFv 3.23 and 3.24 had a Tm of 5° C. higher than the parental CD3.9, while the CD3.25 and CD3.26 (sequences shown in Table 12) scFv had Tₘ that were equivalent to the parental CD3.9.

[0242] 2. Determination of Binding Affinity to CD3

[0243] The binding affinity of each scFv was measured using the ForteBio BLItz instrument. A dilution series of each scFv was prepared in PBS (300 μL/tube) starting from 1000 nM to 62.5 nM in one to one dilution steps for CD3.24-26, 400 nM to 25 nM in one to one dilution steps for CD3.23. Biotinylated CD3CEμ antigen (Creative Biomart) was diluted in PBS to a final concentration of 30 ug/ml. Streptavidin Biosensors (ForteBio) were activated in PBS for 10 minutes. To perform the measurements, the streptavidin biosensors were applied to the BLItz instrument. A tube containing 300 μL of PBS was transferred to the BLItz instrument for 30 seconds. A tube containing biotinylated CD3CEμ (30 ug/ml, 300 μL/tube) was transferred to the BLItz instrument to measure capture of antigen to sensor for 120 seconds. A tube containing 300 μL of PBS was transferred to the BLItz instrument for 30 seconds to measure the baseline signal. A tube containing test scFv (30 ug/ml, 300 μL/tube) was transferred to the BLItz instrument to measure association of the scFv to antigen-loaded biosensor for 120 seconds. A tube containing 300 μL of PBS was transferred to the BLItz instrument for 120 seconds to measure dissociation of the scFv from the antigen-loaded biosensor. The protocol was repeated for each scFv dilution. The KD of each antibody was determined using the BLI software (ForteBio). The results are presented in Table 11, which shows melting temp and binding affinity of the CD3 binding variants, demonstrating that variants such as CD3.23 have reduced binding affinity for CD3.

[0244] The binding affinity of bivalent anti-HER2, anti-CD3 XTENylated binder AC2275 (see Example 24) was measured against targets (HER2 and CD3) using a ForteBio Octet Red instrument. The assay was performed in a PBSTB buffer (10 mM sodium phosphate dibasic, 1.8 mM potassium phosphate monobasic, 137 mM sodium chloride, 2.7 mM potassium chloride, 0.5% BSA, 0.005% Tween-20). For binding to human HER2 or cynomolgus monkey HERa2, a dilution series of each analyte was prepared in PBSTB buffer (500 μL/tube) starting from 64 nM to 1 nM in one to one dilution steps. For binding to human CD3 or cynomolgus monkey CD3, a dilution series of each analyte was prepared in PBSTB buffer (500 μL/tube) starting from 1010 nM to 16 nM in one to one dilution steps. Targets were diluted in PBSTB to a final concentration of 33 ug/ml. Anti-human Fc biosensors (ForteBio) were activated in PBSTB buffer for 10 minutes. To perform the measurements, a set of anti-human Fc biosensors were placed on the sensor rack and were transferred to Octet Red instrument. A 96-well non-binding opaque plate containing 200 μL of PBSTB buffer, glycine buffer, targets and analytes were transferred to Octet Red instrument. Biosensors were transferred to the PBSTB buffer for 600 seconds for equilibration. For activation, biosensors were transferred to a 10 mM glycine buffer, pH 1.5 for 10 seconds and were transferred to PBSTB buffer for 10 seconds. The activation step was repeated for additional 2 times. Biosensors were transferred to the target well for 100 seconds for loading step. Biosensors were transferred to PBSTB buffer for 600 seconds for baseline measurement. Biosensors were transferred to well of analyte for 200-400 seconds for association step. Biosensors were transferred to well of analyte for 300-400 seconds for disassociation step. The protocol was repeated for each target. The binding affinity of each antibody was determined using the Octet Data Analysis software (ForteBio). The results are presented in Table 11A.

[0245] Results: The assay results demonstrate that the CD3 sequence variants all had reduced binding affinity to CD3 in comparison to the parental CD3.9.

TABLE 11
Tₘ and Binding Affinity Results

| scFv Construct | Melting temp (° C.) | Binding Affinity (nM) |
|---|---|---|
| CD3.9 | 57 | 75 |
| CD3.23 | 62 | 175 |
| CD3.24 | 62 | 296 |
| CD3.25 | 57 | 215 |
| CD3.26 | 57 | 221 |

TABLE 11A
Binding Affinity Results of AC2275

| Target | Binding Affinity (nM) |
|---|---|
| Human HER2-Fc | 4.5 |
| Cyno HER2-Fc | 1.2 |
| Human CD3 ϵ -Fc | 111 |
| Cyno CD3 ϵ -Fc | 170 |

TABLE 12
scFv sequences

| | | SEQ ID |
|---|---|---|
| Construct | Amino Acid Sequence | NO: |
| 3.25 | ELVVTQEPSHTVSPGGTVTLTCRSSTGAVTS | 1153 |
| | SNYANWVQQKPGQAPRGLIGGTIKRAPGTPA | |
| | RFSGSLLGGKAALTLSGVQPEDEAEYYCALW | |
| | YPNLWVFGGGTKLTVLGATPPETGAETESPG | |
| | ETTGGSAESEPPGEGEVQLLESGGGIVQPGG | |
| | SLKLSCAASGFTENTYAMNWVRQAPGKGLEW | |
| | VARIRSKYNNYATYYADSVKDRETISRDDSK | |
| | NTVYLQMNNLKTEDTAVYYCVRHENFGNSYV | |
| | SWFAHWGQGTLVTVSS | |
| 3.26 | ELVVTQEPSHTVSPGGTVTLTCRSSTGEVTT | 1154 |
| | SNYANWVQQKPGQAPRGLIGGTIKRAPGTPA | |
| | RFSGSLLGGKAALTLSGVQPEDEAEYYCALW | |
| | YPNLWVFGGGTKLTVLGATPPETGAETESPG | |
| | ETTGGSAESEPPGEGEVQLLESGGGIVQPGG | |
| | SLKLSCAASGFTENTYAMNWVRQAPGKGLEW | |
| | VARIRSKYNNYATYYADSVKDRETISRDDSK | |
| | NTVYLQMNNLKTEDTAVYYCVRHENFGNSYV | |
| | SWFAHWGQGTLVTVSS | |

[0246] Conclusions: Two new anti-CD3 scFvs have been identified that have improved thermal stability. Each new scFv has 8 to 9 mutations relative to CD3.9, residing primarily in the CDRs. These mutations have reduced affinity of the scFvs for their target (CD3) compared to the parental CD3.9 but bispecific T cell engagers utilizing CD3.23 are still efficacious in cell killing assays and in vivo.

### Example 3: Fermentation and Purification of Stable and Unstable Chimeric Fusion Polypeptides Comprising Bispecific Antigen Binding Fragments, Release Segments, and XTEN

[0247] The following example describes production of two highly-similar chimeric bispecific antigen binding fragment compositions, differing only in the anti-CD3 antigen binding fragment utilized, the observed incongruity of aggregation tendency between the two constructs, and the discovery that the sequence of the anti-CD3 antigen binding fragment had a significant impact on production, recovery, and purification of stable, soluble product.

[0248] Construct ID pJB0169 is a molecule having eight distinct domains. From the N-terminus to the C-terminus, the molecule consists of an N-terminal polyhistidine tag (His6 (SEQ ID NO: 1150)), an unstructured 292 amino acid chain (XTEN_AE293), a protease cleavable release segment (RS), an anti-EGFR scFv (aEGFR.2), an anti-CD3 scFv (aCD3.9), another protease cleavable release segment (RS), an unstructured 864 amino acid chain, and four C-terminal residues—glutamic acid, proline, glutamic acid, alanine (C-tag) (XTEN_AE868).

[0249] Construct ID pJB0231 is a molecule configured similarly; from the N-terminus to the C-terminus, the molecule consists of an N-terminal polyhistidine tag (His6 (SEQ ID NO: 1150)), an unstructured 292 amino acid chain (XTEN_AE292), a protease cleavable release segment (RS), an anti-EGFR scFv (aEGFR.2), an anti-CD3 scFv (aCD3.23), another protease cleavable release segment (RS), an unstructured 864 amino acid chain, and four C-terminal residues—glutamic acid, proline, glutamic acid, alanine (C-tag) (XTEN_AE868).

[0250] EXPRESSION: Both molecules (pJB0169 and pJB0231) were expressed in a proprietary E. coli AmE098 strain and partitioned into the periplasm via an N-terminal secretory leader sequence (MKKNIAFLLASMFVFSIATNAYA-(SEQ ID NO: 1155)), which was cleaved during translocation. Fermentation cultures were grown with animal-free complex medium at 37° C. and temperature shifted to 26° C. prior to phosphate depletion with continued fermentation for 12 hours following phosphate depletion. During harvest, fermentation whole broth was centrifuged to pellet the cells. At harvest, the total volume and the wet cell weight (WCW; ratio of pellet to supernatant) were recorded, and the pelleted cells were collected and frozen at −80° C.

[0251] CLARIFICATION: Frozen cell pellet of each molecule (pJB0169 and pJB0231) was resuspended 3-fold in lysis buffer (60 mM acetic acid, 350 mM NaCl) at pH 4.5, and the cells were lysed via homogenization. The homogenate was flocculated overnight at pH 4.5 and 2-8° C. The flocculated homogenate was centrifuged, and the supernatant was retained. The supernatant was diluted approximately 3-fold with water, then adjusted to 7±1 mS/cm with NaCl. The supernatant was then adjusted to 0.1% (m/m) diatomaceous earth and mixed via impeller. The supernatant was filtered through a filter train ending with a 0.22 μm filter. The filtrate was adjusted to pH 7.0 with sodium phosphate dibasic.

[0252] PURIFICATION: Each molecule (pJB0169 and pJB0231) was initially captured from clarified lysate and purified by Protein-L Chromatography (TOYOPEARL AF-rProtein L-650F). Subsequently, IMAC chromatography (GE IMAC Sepharose 6 FF) was used to select for the N-terminal His6-tag (SEQ ID NO: 1150), then C-tag affinity chromatography (CaptureSelect C-tagXL Affinity Matrix) was used to select for the C-terminal EPEA-tag (SEQ ID NO: 1149). Anion exchange chromatography (BIA CIMmultus QA monolith) was used to remove HMWCs and to polish to final purity.

[0253] ANALYTICS: The aggregation state of the process intermediates was monitored by SEC-HPLC. The SEC-HPLC method was performed using a Phenomenex 3 μm SEC-4000 300×7.8 mm (P/N 00H-4514-K0), a 20-minute isocratic method, at 1 mL/min, while monitoring the absorbance at 220 nm. pJB0169 monomer elutes from the analytical column at 6.2 minutes, and HMWC elute from 4.8-6.0 minutes. SEC-HPLC quality was measured as the relative area under the curve at 6.2 minutes versus the total area under the curve from 4.8-6.4 minutes.

[0254] Results: Aggregation summary (SEC-HPLC % monomer) for construct pJB0169 and construct pJB0231 following each unit operation are presented in Table 13. Recovery of ≥95% monomer was the quality threshold upon final polishing as the criterion for considering a molecule stable or processable.

TABLE 13
Analytic Results

| Unit | Unit | | |
|---|---|---|---|
| Operation | Operation | pJB0169 | pJB0231 |
| Number | Description | αEGFR.2-αCD3.9 | αEGFR.2-αCD3.23 |
| 1 | Clarified | 26.7% | 4.4% |
| | lysate | | |
| 2 | Protein L | 40.7% | 13.0% |
| | eluate | | |
| 3 | IMAC eluate | 52.8% | 36.9% |
| 4 | C-tag eluate | 71.0% | 53.8% |
| 5 | AEX eluate | 99.9% | 79.2% |
| | | Stable | unstable |

[0255] CONCLUSIONS: Construct pJB0169 was purified to the target monomeric quality by SEC-HPLC (≥95% monomer), indicating that the construct is stable and compatible with both recovery and purification operations. However, construct pJB0231 could not be purified to the target monomeric quality, achieving only 79% monomer upon final polishing, indicating that the construct is either unstable or incompatible with recovery or purification operations (or a combination thereof). Because the only difference between pJB0169 and pJB0231 is the anti-CD3 scFv sequence, it was hypothesized that the anti-CD3.23 scFv is incompatible within the context of the bispecific molecule as composed with the various components.

[0256] STABILITY IMPROVEMENT AND ASSESSMENT: New scFvs (anti-EGFR.23 and anti-CD3.32) were designed for improved stability via (1) reduction of surface hydrophobicity and (2) reduction of isoelectric point differences between the paired scFv molecules (fused by a short peptide linker) by substitution of amino acids at select locations. Constructs pAH0025 and pAH0026 represent design iterations on pJB0169, where pAH0025 contains the anti-CD3.32 scFv variant, and pAH0026 contains both the anti-CD3.32 scFv variant and the EGFR.23 scFv variant. Constructs pAH0025 and pAH0026 would be expressed, clarified, purified, and analyzed as above; the SEC-HPLC results throughout the purification would be monitored and compared to pJB0169 and pJB0231 to assess relative stability. New design pairings are anticipated to be more stable than pJB0231 and would be expected to show concomitant improvement in percent monomer content, as measured by SEC-HPLC, following the unit operations tabulated below in Table 14 (or a subset thereof). Any construct that meets the purity target of >95% monomer would be considered stable or processable.

TABLE 14
analytic results

| | Unit | SEC-HPLC quality (% monomer) | | | |
|---|---|---|---|---|---|
| Unit | Operation | pJB0169 | pJB0231 | pAH0025 | pAH0026 |
| Operation | Descrip- | αEGFR.2- | αEGFR.2- | αEGFR.2- | αEGFR.23- |
| Number | tion | αCD3.9 | αCD3.23 | αCD3.32 | αCD3.32 |
| 1 | Clarified | 26.7% | 4.4% | TBD | TBD |
| | lysate | | | | |
| 2 | Protein L | 40.7% | 13.0% | TBD | TBD |
| | eluate | | | | |
| 3 | IMAC | 52.8% | 36.9% | TBD | TBD |
| | eluate | | | | |
| 4 | C-tag | 71.0% | 53.8% | TBD | TBD |
| | eluate | | | | |
| 5 | AEX | 99.9% | 79.2% | TBD | TBD |
| | eluate | | | | |
| | | stable | unstable | TBD | TBD |

### Example 4: Binding Affinity of Anti-EpCAM×Anti-CD3 Bispecific Antigen Binding Polypeptide Composition

[0257] The binding affinity of anti-EpCAM×anti-CD3 bispecific antigen binding polypeptide constructs to human EpCAM and human CD3 was measured using flow cytometry with huEp-CHO 4-12B (CHO cell line transfected with human EpCAM) and Jurkat cells.

[0258] The binding constants for anti-EpCAM×anti-CD3 bispecific antigen binding polypeptide binding to EpCAM-expressing and CD3-expressing cells was measured by competition binding with a fluorescently-labeled, protease-treated bispecific antigen binding polypeptide. The fluorescently-labeled, protease-treated bispecific antigen binding polypeptide was made by conjugation of Alexa Fluor 647 C2 maleimide (Thermo Fisher, cat#A20347) to a cysteine-containing, protease-treated bispecific antigen binding polypeptide mutant (MMP-9 treated pCW1645). Binding experiments were performed on 10,000 cells at 4° C. for 1 hour in a total volume of 100 μL of binding buffer (2% FCS, 5 mM EDTA, HBSS). Cells were washed once with cold binding buffer, then re-suspended in 1% formaldehyde in phosphate-buffered saline and immediately analyzed on a Millipore Guava easyCyte flow cytometer. Binding of the fluorescently-labeled, protease-treated pCW1645 was found to have an apparent K_{d} value of 1 nM to hEp-CHO 4-12B and 4 nM to CD3+Jurkat cells.

[0259] Competition binding experiments were performed on 10,000 hEp-CHO 4-12B cells with 1.5 nM fluorescently-labeled, protease-treated pCW1645 at 4° C. for 1 hour in a total volume of 100 μL of binding buffer (2% FCS, 5 mM EDTA, HBSS). Cells were washed once with cold binding buffer, then re-suspended in 1% formaldehyde in phosphate-buffered saline and immediately analyzed on a Millipore Guava easyCyte flow cytometer. Competition binding of fluorescently labeled, protease-treated pCW1645 to hEp-CHO 4-12B cells with cleaved bispecific antigen binding polypeptide (pJB0189 hEp.2-hCD3.9 or AC1984 hEp.2-hCD3.23) resulted in apparent binding constants of 0.5 nM for hEp.2 (panitumumab).

[0260] Competition binding experiments were performed on 10,000 Jurkat cells with 10 nM fluorescently-labeled, protease-treated pCW1645 at 4° C. for 1 hour in a total volume of 100 μL of binding buffer (2% FCS, 5 mM EDTA, HBSS). Cells were washed once with cold binding buffer, then re-suspended in 1% formaldehyde in phosphate-buffered saline and immediately analyzed on a Millipore Guava easyCyte flow cytometer. Competition binding of fluorescently-labeled, protease-treated pCW1645 to Jurkat cells with cleaved bispecific antigen binding polypeptide (pJB0189 hEp.2-hCD3.9 or AC1984 hEp.2-hCD3.23) resulted in apparent binding constants of 75 nM for hCD3.9 and 300 nM for hCD3.23 for CD3 binding and 0.5 nM for EpCAM binding.

[0261] Conclusions: The binding affinity of CD3.23 for CD3 on Jurkat cells is 300 nM, which is 4-fold weaker than the affinity of CD3.9. The binding affinity of hEp.2 for EpCAM on Jurkat cells is 0.5 nM.

### Example 5: Binding Affinity of Anti-HER2×Anti-CD3 Bispecific Antigen Binding Polypeptide Composition

[0262] The binding affinity of anti-HER2×anti-CD3 bispecific antigen binding polypeptide constructs to human HER2 and human CD3 are measured using flow cytometry with hHER2-CT26 (CT26 cell line transfected with human HER2) and Jurkat cells.

[0263] The binding constants for anti-HER2×anti-CD3 bispecific antigen binding polypeptide binding to HER2-expressing and CD3-expressing cells are measured by competition binding with a fluorescently labeled, protease-treated bispecific antigen binding polypeptide. The fluorescently labeled bispecific antigen binding polypeptide is made by conjugation of Alexa Fluor 647 C2 maleimide (Thermo Fisher, cat#A20347) to a cysteine-containing bispecific antigen binding polypeptide mutant (MMP-9 treated pJB0297 (see Table 14B)) with hHER2.2-hCD3.23 and two XTEN. The fluorescently-labeled, protease-treated bispecific antigen binding polypeptide is made by conjugation of Alexa Fluor 647 C2 maleimide (Thermo Fisher, cat#A20347) to a cysteine-containing, protease-treated bispecific antigen binding polypeptide mutant (MMP-9 treated pJB0297). Binding experiments are performed on 10,000 cells at 4° C. for 1 hour in a total volume of 100 μL of binding buffer (2% FCS, 5 mM EDTA, HBSS). Cells are washed once with cold binding buffer, then re-suspended in 1% formaldehyde in phosphate-buffered saline and immediately analyzed on a Millipore Guava easyCyte flow cytometer. Binding of the fluorescently-labeled, protease-treated pJB0297 is expected to have an apparent K_{d} value in the low nM concentration to hHER2-CT26 and about 300 nM to CD3+ Jurkat cells. Binding of the fluorescently-labeled pJB0297 with two XTEN is expected to have an apparent K_{d} value about 10- to 100-fold weaker than for fluorescently-labeled, protease-treated bispecific antigen binding polypeptide to hHER2-CT26 and CD3+ Jurkat cells.

[0264] Competition binding experiments are performed on 10,000 hHER2-CT26 cells at a concentration of fluorescently-labeled, protease-treated pJB0297 close to the K_{d} from the previously described binding experiment at 4° C. for 1 hour in a total volume of 100 μL of binding buffer (2% FCS, 5 mM EDTA, HBSS). Cells are washed once with cold binding buffer, then re-suspended in 1% formaldehyde in phosphate-buffered saline and immediately analyzed on a Millipore Guava easyCyte flow cytometer. Competition binding of fluorescently-labeled, protease-treated pJB0297 to hHER2-CT26 cells with pJB0244 bispecific antigen binding polypeptide is expected to have an apparent binding constant similar to the direct binding constant of fluorescently-labeled pJB0297.

[0265] Competition binding experiments are performed on 10,000 Jurkat cells with about 300 nM (or a concentration close to the K_{d} from the previously described binding experiment) of fluorescently-labeled, protease-treated pJB0297 at 4° C. for 1 hour in a total volume of 100 μL of binding buffer (2% FCS, 5 mM EDTA, HBSS). Cells are washed once with cold binding buffer, then re-suspended in 1% formaldehyde in phosphate-buffered saline and immediately analyzed on a Millipore Guava easyCyte flow cytometer. Competition binding of fluorescently-labeled, protease-treated pJB0297 to Jurkat cells with pJB0244 bispecific antigen binding polypeptide is expected to have an apparent binding constant similar to the direct binding constant of fluorescently-labeled pJB0297, which is expected to be in the low micromolar to nanomolar concentration range.

TABLE 14B
pJB0297-DNA and Amino Acid Sequence

| Construct | | SEQ ID | Amino Acid | SEQ ID |
|---|---|---|---|---|
| Name | DNA Sequence | NO: DNA | Sequence (AA) | NO: AA |
| pJB0297 | CACCATCATCACCATCACTCCCCA | 1137 | HHHHHHSPAGSPTSTEEGTSES | 1138 |
| | GCAGGCAGCCCGACCAGCACCGAG | | ATPESGPGTSTEPSEGSAPGTS | |
| | GAGGGTACGAGCGAGTCGGCTACT | | ESATPESGPGSEPATSGSETPG | |
| | CCAGAGAGCGGTCCGGGTACCTCT | | TSESATPESGPGSEPATSGSET | |
| | ACGGAACCGTCCGAAGGTAGCGCT | | PGTSESATPESGPGTSTEPSEG | |
| | CCAGGCACGTCTGAAAGCGCGACG | | SAPGSPAGSPTSTEEGTSESAT | |
| | CCGGAAAGCGGTCCAGGCAGCGAG | | PESGPGSEPATSGSETPGTSES | |
| | CCGGCGACCTCCGGTAGCGAAACG | | ATPESGPGSPAGSPTSTEEGSP | |
| | CCTGGTACCTCGGAGTCAGCGACT | | AGSPTSTEEGTSTEPSEGSAPG | |
| | CCGGAAAGCGGTCCGGGTAGCGAA | | TSESATPESGPGTSESATPESG | |
| | CCTGCAACGAGCGGTAGCGAGACT | | PGTSESATPESGPGSEPATSGS | |
| | CCAGGCACTAGCGAATCCGCAACT | | ETPGSEPATSGSETPGSPAGSP | |
| | CCGGAGTCGGGTCCGGGCACCTCT | | TSTEEGTSTEPSEGSAPGTSTE | |
| | ACGGAGCCTAGCGAGGGCTCAGCA | | PSEGSAPGGSAPEAGRSANHTP | |
| | CCAGGTAGCCCTGCAGGTTCCCCG | | AGLTGPATSGSETPGTDIQMTQ | |
| | ACGTCAACCGAGGAAGGTACAAGC | | SPSSLSASVGDRVTITCKASQD | |
| | GAAAGCGCCACCCCTGAGTCGGGC | | VSIGVAWYQQKPGKAPKLLIYS | |
| | CCTGGCAGCGAACCGGCAACTAGC | | ASYRYTGVPSRFSGSGSGTDFT | |
| | GGCAGCGAGACTCCGGGTACCAGC | | LTISSLQPEDFATYYCQQYYIY | |
| | GAGTCTGCTACGCCAGAGAGCGGC | | PYTFGQGTKVEIKGATPPETGA | |
| | CCAGGTTCGCCAGCGGGTTCGCCG | | ETESPGETTGGSAESEPPGEGE | |
| | ACTAGCACGGAGGAGGGCAGCCCA | | VQLVESGGGLVQPGGSLRLSCA | |
| | GCGGGTAGCCCGACCAGCACTGAG | | ASGFTFTDYTMDWVRQAPGKGL | |
| | GAGGGTACGTCCACCGAACCGAGC | | EWVADVNPNSGGSIYNQRFKGR | |
| | GAAGGTAGCGCACCAGGTACCTCC | | FTLSVDRSKNTLYLQMNSLRAE | |
| | GAGTCTGCCACCCCTGAATCCGGT | | DTAVYYCARNLGPSFYFDYWGQ | |
| | CCAGGTACCAGCGAATCAGCCACC | | GTLVTVSSGGGGSELVVTQEPS | |
| | CCGGAGTCGGGTCCAGGTACGAGC | | LTVSPGGTVTLTCRSSNGAVTS | |
| | GAATCTGCTACCCCGGAATCCGGC | | SNYANWVQQKPGQAPRGLIGGT | |
| | CCAGGCAGCGAACCTGCTACTAGC | | NKRAPGTPARFSGSLLGGKAAL | |
| | GGCAGCGAAACGCCGGGCAGCGAA | | TLSGVQPEDEAVYYCALWYPNL | |
| | CCTGCCACGTCAGGCAGCGAGACG | | WVFGGGTKLTVLGATPPETGAE | |
| | CCGGGTTCCCCTGCAGGCTCCCCG | | TESPGETTGGSAESEPPGEGEV | |
| | ACCAGCACTGAGGAGGGCACCTCC | | QLLESGGGIVQPGGSLKLSCAA | |
| | ACCGAACCATCAGAAGGTAGCGCG | | SGFTFNTYAMNWVRQAPGKGLE | |
| | CCTGGTACGTCAACCGAACCTTCC | | WVARIRSKYNNYATYYADSVKD | |
| | GAGGGCAGCGCACCGGGTGGCTCA | | RFTISRDDSKNTVYLQMNNLKT | |
| | GCGCCTGAGGCAGGTCGTTCTGCT | | EDTAVYYCVRHENFGNSYVSWF | |
| | AACCATACCCCTGCAGGATTAACT | | AHWGQGTLVTVSSGTAEAASAC | |
| | GGCCCCGCCACCAGCGGGAGCGAG | | GEAGRSANHTPAGLTGPPGSPA | |
| | ACCCCCGGGACTGACATTCAGATG | | GSPTSTEEGTSESATPESGPGT | |
| | ACTCAGTCTCCGTCCTCCCTGTCT | | STEPSEGSAPGSPAGSPTSTEE | |
| | GCGAGCGTGGGCGACCGTGTGACT | | GTSTEPSEGSAPGTSTEPSEGS | |
| | ATTACCTGTAAAGCCTCCCAGGAC | | APGTSESATPESGPGSEPATSG | |
| | GTGTCTATCGGTGTGGCATGGTAT | | SETPGSEPATSGSETPGSPAGS | |
| | CAACAAAAGCCGGGTAAGGCACCT | | PTSTEEGTSESATPESGPGTST | |
| | AAACTGCTGATCTACTCCGCTTCT | | EPSEGSAPGTSTEPSEGSAPGS | |
| | TACCGTTACACGGGCGTTCCGTCC | | PAGSPTSTEEGTSTEPSEGSAP | |
| | CGTTTTAGCGGTTCCGGTAGCGGT | | GTSTEPSEGSAPGTSESATPES | |
| | ACTGATTTTACCCTGACTATTTCC | | GPGTSTEPSEGSAPGTSESATP | |
| | TCCCTGCAACCAGAAGACTTTGCG | | ESGPGSEPATSGSETPGTSTEP | |
| | ACCTATTACTGTCAGCAATACTAT | | SEGSAPGTSTEPSEGSAPGTSE | |
| | ATTTACCCGTATACCTTCGGCCAG | | SATPESGPGTSESATPESGPGS | |
| | GGCACTAAGGTTGAAATTAAAGGT | | PAGSPTSTEEGTSESATPESGP | |
| | GCAACGCCTCCGGAGACTGGTGCT | | GSEPATSGSETPGTSESATPES | |
| | GAAACTGAGTCCCCGGGCGAGACG | | GPGTSTEPSEGSAPGTSTEPSE | |
| | ACCGGTGGCTCTGCTGAATCCGAA | | GSAPGTSTEPSEGSAPGTSTEP | |
| | CCACCGGGCGAAGGCGAGGTTCAG | | SEGSAPGTSTEPSEGSAPGTST | |
| | CTGGTGGAGTCTGGCGGCGGTCTG | | EPSEGSAPGSPAGSPTSTEEGT | |
| | GTACAGCCGGGTGGTAGCCTGCGT | | STEPSEGSAPGTSESATPESGP | |
| | CTGAGCTGCGCGGCGTCCGGTTTC | | GSEPATSGSETPGTSESATPES | |
| | ACTTTCACCGATTATACCATGGAC | | GPGSEPATSGSETPGTSESATP | |
| | TGGGTTCGCCAGGCACCGGGCAAG | | ESGPGTSTEPSEGSAPGTSESA | |
| | GGTCTGGAATGGGTGGCGGACGTG | | TPESGPGSPAGSPTSTEEGSPA | |
| | AACCCGAACTCCGGTGGTTCTATC | | GSPTSTEEGSPAGSPTSTEEGT | |
| | TACAACCAGCGTTTCAAAGGTCGT | | SESATPESGPGTSTEPSEGSAP | |
| | TTCACGCTGAGCGTAGATCGTAGC | | GTSESATPESGPGSEPATSGSE | |
| | AAAAACACTCTGTACCTGCAGATG | | TPGTSESATPESGPGSEPATSG | |
| | AACTCCCTGCGCGCAGAAGACACC | | SETPGTSESATPESGPGTSTEP | |
| | GCGGTGTATTACTGTGCACGTAAC | | SEGSAPGSPAGSPTSTEEGTSE | |
| | CTGGGCCCGTCCTTCTATTTCGAC | | SATPESGPGSEPATSGSETPGT | |
| | TACTGGGGTCAAGGTACTCTGGTA | | SESATPESGPGSPAGSPTSTEE | |
| | ACTGTTTCCTCTGGTGGTGGCGGC | | GSPAGSPTSTEEGTSTEPSEGS | |
| | AGCGAGTTAGTTGTGACCCAAGAG | | APGTSESATPESGPGTSESATP | |
| | CCGAGCCTGACCGTTAGCCCGGGT | | ESGPGTSESATPESGPGSEPAT | |
| | GGTACGGTCACCCTGACGTGCCGT | | SGSETPGSEPATSGSETPGSPA | |
| | AGCAGCAACGGTGCGGTCACGAGC | | GSPTSTEEGTSTEPSEGSAPGT | |
| | AGCAACTATGCCAATTGGGTCCAG | | STEPSEGSAPGSEPATSGSETP | |
| | CAGAAACCGGGTCAAGCACCGCGT | | GTSESATPESGPGTSTEPSEGA | |
| | GGCCTGATCGGCGGCACCAATAAA | | AEPEA | |
| | CGTGCCCCGGGTACTCCTGCGCGT | | | |
| | TTCTCCGGTAGCCTGCTGGGCGGC | | | |
| | AAAGCCGCTCTGACCCTGAGCGGT | | | |
| | GTCCAGCCGGAAGATGAAGCGGTG | | | |
| | TACTACTGCGCGCTGTGGTATCCG | | | |
| | AATCTGTGGGTTTTTGGCGGCGGT | | | |
| | ACCAAGCTGACCGTATTGGGTGCT | | | |
| | ACGCCACCGGAGACTGGCGCAGAA | | | |
| | ACGGAAAGCCCGGGTGAGACTACG | | | |
| | GGTGGCTCTGCGGAGAGCGAACCT | | | |
| | CCGGGTGAGGGTGAGGTCCAACTG | | | |
| | CTGGAGTCTGGTGGTGGCATTGTT | | | |
| | CAACCGGGTGGCTCGTTGAAGCTG | | | |
| | AGCTGTGCAGCTAGCGGCTTTACC | | | |
| | TTCAACACCTATGCGATGAATTGG | | | |
| | GTTCGTCAGGCACCGGGTAAGGGC | | | |
| | CTGGAATGGGTGGCGCGTATCCGC | | | |
| | TCCAAGTACAACAACTACGCGACC | | | |
| | TACTACGCGGATAGCGTTAAAGAC | | | |
| | CGCTTCACGATTAGCCGTGACGAT | | | |
| | TCCAAGAATACGGTGTATCTGCAA | | | |
| | ATGAACAATCTGAAAACCGAAGAT | | | |
| | ACCGCGGTGTATTACTGTGTGCGC | | | |
| | CACGAAAATTTCGGCAACAGCTAC | | | |
| | GTGAGCTGGTTTGCACATTGGGGT | | | |
| | CAGGGCACCCTGGTTACGGTGAGC | | | |
| | TCCGGGACTGCTGAGGCGGCTAGC | | | |
| | GCCTGTGGAGAAGCTGGAAGAAGC | | | |
| | GCCAATCACACACCAGCTGGACTT | | | |
| | ACAGGCCCGCCTGGTAGCCCCGCG | | | |
| | GGGAGCCCTACAAGCACTGAGGAG | | | |
| | GGCACATCTGAGTCCGCTACCCCT | | | |
| | GAGAGTGGACCCGGGACAAGCACT | | | |
| | GAGCCTAGCGAAGGAAGCGCACCA | | | |
| | GGTTCCCCCGCTGGGAGCCCCACA | | | |
| | AGCACAGAAGAGGGAACTTCTACC | | | |
| | GAGCCCTCTGAGGGCTCAGCCCCT | | | |
| | GGAACTAGCACAGAGCCCTCCGAA | | | |
| | GGCAGTGCACCGGGTACTTCCGAA | | | |
| | AGCGCAACTCCGGAATCCGGCCCT | | | |
| | GGTTCTGAGCCTGCTACTTCCGGC | | | |
| | TCTGAAACTCCAGGTAGCGAGCCA | | | |
| | GCGACTTCTGGTTCTGAAACTCCA | | | |
| | GGTTCACCGGCGGGTAGCCCGACG | | | |
| | AGCACGGAGGAAGGTACCTCTGAG | | | |
| | TCGGCCACTCCTGAGTCCGGTCCG | | | |
| | GGCACGAGCACCGAGCCGAGCGAG | | | |
| | GGTTCAGCCCCGGGTACCAGCACG | | | |
| | GAGCCGTCCGAGGGTAGCGCACCG | | | |
| | GGTTCTCCGGCGGGCTCCCCTACG | | | |
| | TCTACGGAAGAGGGTACGTCCACT | | | |
| | GAACCTAGCGAGGGCAGCGCGCCA | | | |
| | GGCACCAGCACTGAACCGAGCGAA | | | |
| | GGCAGCGCACCTGGCACTAGCGAG | | | |
| | TCTGCGACTCCGGAGAGCGGTCCG | | | |
| | GGTACGAGCACGGAACCAAGCGAA | | | |
| | GGCAGCGCCCCAGGTACCTCTGAA | | | |
| | TCTGCTACCCCAGAATCTGGCCCG | | | |
| | GGTTCCGAGCCAGCTACCTCTGGT | | | |
| | TCTGAAACCCCAGGTACTTCCACT | | | |
| | GAACCAAGCGAAGGTAGCGCTCCT | | | |
| | GGCACTTCTACTGAACCATCCGAA | | | |
| | GGTTCCGCTCCTGGTACGTCTGAA | | | |
| | AGCGCTACCCCTGAAAGCGGCCCA | | | |
| | GGCACCTCTGAAAGCGCTACTCCT | | | |
| | GAGAGCGGTCCAGGCTCTCCAGCA | | | |
| | GGTTCTCCAACCTCCACTGAAGAA | | | |
| | GGCACCTCTGAGTCTGCTACCCCT | | | |
| | GAATCTGGTCCTGGCTCCGAACCT | | | |
| | GCTACCTCTGGTTCCGAAACTCCA | | | |
| | GGTACCTCGGAATCTGCGACTCCG | | | |
| | GAATCTGGCCCGGGCACGAGCACG | | | |
| | GAGCCGTCTGAGGGTAGCGCACCA | | | |
| | GGTACCAGCACTGAGCCTTCTGAG | | | |
| | GGCTCTGCACCGGGTACCTCCACG | | | |
| | GAACCTTCGGAAGGTTCTGCGCCG | | | |
| | GGTACCTCCACTGAGCCATCCGAG | | | |
| | GGTTCAGCACCAGGTACTAGCACG | | | |
| | GAACCGTCCGAGGGCTCTGCACCA | | | |
| | GGTACGAGCACCGAACCGTCGGAG | | | |
| | GGTAGCGCTCCAGGTAGCCCAGCG | | | |
| | GGCTCTCCGACAAGCACCGAAGAA | | | |
| | GGCACCAGCACCGAGCCGTCCGAA | | | |
| | GGTTCCGCACCAGGTACAAGCGAG | | | |
| | AGCGCGACTCCTGAATCTGGTCCG | | | |
| | GGTAGCGAGCCTGCAACCAGCGGT | | | |
| | TCTGAGACGCCGGGCACTTCCGAA | | | |
| | TCTGCGACCCCGGAGTCCGGTCCA | | | |
| | GGTTCAGAGCCGGCGACGAGCGGT | | | |
| | TCGGAAACGCCGGGTACGTCTGAA | | | |
| | TCAGCCACGCCGGAGTCTGGTCCG | | | |
| | GGTACCTCGACCGAACCAAGCGAA | | | |
| | GGTTCGGCACCGGGTACTAGCGAG | | | |
| | AGCGCAACCCCTGAAAGCGGTCCG | | | |
| | GGCAGCCCGGCAGGTTCTCCAACC | | | |
| | AGCACCGAAGAAGGTTCCCCTGCT | | | |
| | GGTAGCCCGACCTCTACGGAGGAA | | | |
| | GGTAGCCCTGCAGGTTCCCCAACT | | | |
| | TCTACTGAGGAAGGTACTTCTGAG | | | |
| | TCCGCTACCCCAGAAAGCGGTCCT | | | |
| | GGTACCTCCACTGAACCGTCTGAA | | | |
| | GGCTCTGCACCAGGCACTTCTGAG | | | |
| | TCTGCTACTCCAGAAAGCGGCCCA | | | |
| | GGTTCTGAACCAGCAACTTCTGGC | | | |
| | TCTGAGACTCCAGGCACTTCTGAG | | | |
| | TCCGCAACGCCTGAATCCGGTCCT | | | |
| | GGTTCTGAACCAGCTACTTCCGGC | | | |
| | AGCGAAACCCCAGGTACCTCTGAG | | | |
| | TCTGCGACTCCAGAGTCTGGTCCT | | | |
| | GGTACTTCCACTGAGCCTAGCGAG | | | |
| | GGTTCCGCACCAGGTTCTCCGGCT | | | |
| | GGTAGCCCGACCAGCACGGAGGAG | | | |
| | GGTACGTCTGAATCTGCAACGCCG | | | |
| | GAATCGGGCCCAGGTTCGGAGCCT | | | |
| | GCAACGTCTGGCAGCGAAACCCCG | | | |
| | GGTACCTCCGAATCTGCTACACCG | | | |
| | GAAAGCGGTCCTGGCAGCCCTGCT | | | |
| | GGTTCTCCAACCTCTACCGAGGAG | | | |
| | GGTTCACCGGCAGGTAGCCCGACT | | | |
| | AGCACTGAAGAAGGTACTAGCACG | | | |
| | GAGCCGAGCGAGGGTAGTGCTCCG | | | |
| | GGTACGAGCGAGAGCGCAACGCCA | | | |
| | GAGAGCGGTCCAGGCACCAGCGAA | | | |
| | TCGGCCACCCCTGAGAGCGGCCCA | | | |
| | GGTACTTCTGAGAGCGCCACTCCT | | | |
| | GAATCCGGCCCTGGTAGCGAGCCG | | | |
| | GCAACCTCCGGCTCAGAAACTCCT | | | |
| | GGTTCGGAACCAGCGACCAGCGGT | | | |
| | TCTGAAACTCCGGGTAGCCCGGCA | | | |
| | GGCAGCCCAACGAGCACCGAAGAG | | | |
| | GGTACCAGCACGGAACCGAGCGAG | | | |
| | GGTTCTGCCCCGGGTACTTCCACC | | | |
| | GAACCATCGGAGGGCTCTGCACCT | | | |
| | GGTAGCGAACCTGCGACGTCTGGT | | | |
| | TCTGAAACGCCGGGTACCAGCGAA | | | |
| | AGCGCTACCCCAGAATCCGGTCCG | | | |
| | GGCACTAGCACCGAGCCATCGGAG | | | |
| | GGCGCCGCAGAACCAGAGGCG | | | |

### Example 6: Human/Cynomolgus Monkey Cross-Reactivity of Anti-HER2×Anti-CD3 Bispecific Antigen Binding Polypeptide Composition

[0266] Redirected cellular cytotoxicity of an activated, cleaved (such that the masking XTEN are removed) anti-HER2×anti-CD3 bispecific antigen binding polypeptide composition (protease treatment of pJB0244 to result in pJB0244A) was compared in both human and cynomolgus monkey cell-based assay systems to investigate whether the cynomolgus monkey can serve as relevant species for pharmacologic and toxicological safety.

[0267] Human and cynomolgus monkey peripheral blood mononuclear cells (PBMC) were used as effector cells and HER2 transfected CT26 cells as targets. Human PBMC were isolated from screened, healthy donors by ficoll density gradient centrifugation from either whole blood or from lymphocyte-enriched buffy coat preparations obtained from local blood banks or Bioreclamation IVT. Cryopreserved normal cynomolgus monkey PBMCs were obtained from IQ Biosciences. PBMCs were thawed quickly in a 37° C. water bath and centrifuged with culture media (RPMI+FBS 10%) at 1300 rpm for 5 minutes and then the supernatant was removed. Both human and cynomolgus monkey PBMCs were resuspended and cultured at appropriate cell density as discussed below in RPMI-1640/FBS 10% at 37° C. in a 5% CO₂ humidified incubator until use. CT26 cells stably expressing human (CT26-huHER2) or cynomolgus monkey HER2 (CT26-cyHER2) were generated by transfecting full length huHER2 or cyno HER2 cDNA into mouse CT26 tumor cells and selecting for puromycin resistant clones. Selection of clones and amplification of expression was conducted in the presence of puromycin.

[0268] Caspase Glo 3/7 assay was used for the determination of the cytolytic activity of protease-treated anti-HER2×anti-CD3 cleavable bispecific antigen binding polypeptide composition (pJB0244). Caspase 3/7 assay utilizes a proluminescent caspase-3/7 DEVD-aminoluciferin substrate (“DEVD” disclosed SEQ ID NO: 1156) and a thermostable luciferase in a reagent optimized for caspase-3/7 activity, luciferase activity and cell lysis. Adding the reagent results in cell lysis, followed by caspase cleavage of the substrate. This liberates free aminoluciferin, which is consumed by the luciferase, generating a “glow-type” luminescent signal that is proportional to caspase-3/7 activity/cell lysis.

[0269] The cytotoxic performance of the protease-treated anti-HER2×anti-CD3 bispecific antigen binding polypeptide compositions with CT26-huHER2 and CT26-cyHER2 transfected cells was analyzed as follows: cell density of human and cyno PBMCs was first adjusted 2×10⁶ cells/mL, respectively, in assay medium comprised of RPMI/FBS 10%. CT26-huHER2 and CT26-cyHER2 transfected cells were resuspended at 5×10⁵ cells/mL assay medium comprised of RPMI/FBS 10% to achieve an effector to target ratio of 5:1. 50 μL aliquots of PBMC were co-cultured with 40 μL aliquots of CT26-huHER2/CT26-cyHER2 transfected cells per assay well in a 96-well round-bottom plate. Unmasked (protease treated) anti-HER2×anti-CD3 composition sample was diluted in assay medium to the desired dose concentration and added in 10 μL to the respective experimental wells bringing the total assay volume to 100 μL. The unmasked (no flanking XTEN) anti-HER2×anti-CD3 composition was evaluated as an 8-point, 5× serial diluted dose concentration starting at 1 nM to obtain a final dose range of 0.00006 to 1 nM. An assay control for background had an intact, untreated anti-HER2×anti-CD3 composition (pJB0244), only PBMC cells with CT26 transfected cells was also set up at this time. The plate containing experimental wells of unmasked protease-treated anti-HER2×anti-CD3 bispecific antigen binding polypeptide composition and the respective assay controls, all tested in duplicates, was then allowed to incubate overnight in a 37° C., 5% CO₂ humidified incubator.

[0270] The amount of Caspase 3/7 released into the supernatant as a result of cell lysis was measured using the Promega Caspase-Glo 3/7 Assay kit and following manufacturer's instructions. Before starting the assay, Caspase-Glo 3/7 Reagent was allowed to thaw and equilibrate to room temperature. A 96-well plate containing treated cells was removed from the incubator and allowed to equilibrate to room temperature. To each well in the enzymatic plate, 100 μl of Caspase-Glo 3/7 Reagent was added. The plate was then covered, protected from light and allowed to incubate at room temperature for 30 min. After the desired incubation period, the contents of wells were gently mixed using a plate shaker at 300-500 rpm for 30 seconds. Luminescence of each sample was measured in a plate-reading luminometer as directed by the luminometer manufacturer.

[0271] Data analysis was then performed as follows: dose concentration of unmasked, protease treated anti-HER2×anti-CD3 composition was then plotted against cytotoxicity (Relative Luminescence Units) measured, and the concentration of protein that gave half maximal response (EC₅₀) was derived with a 4-parameter logistic regression equation using GraphPad prism software.

[0272] Exposure of CT26-huHER2 transfected cells to unmasked protease treated anti-HER2×anti-CD3 composition in the presence of human PBMCs yielded concentration-dependent cytotoxic dose curves, with an EC₅₀ of 0.5 pM. With CT26-cyHER2 transfected cells and cynomolgus PBMCs, protease-treated anti-HER2×anti-CD3 composition yielded concentration-dependent cytotoxic dose curve with an EC50 of 1.2 pM.

[0273] Conclusions: The data indicate that protease-treated anti-HER2×anti-CD3 (pJB0244A) is cross-reactive with cyno HER2 (as in the CT26-cyHER2 transfected cells and cyno CD3 (as in cynomolgus PBMCs). Target cells expressing human HER2 were more potently lysed by human PBMC cells than those expressing cynomolgus monkey HER2. Human PBMC cells showed a 2.4-fold higher potency of redirected lysis with protease-treated anti-HER2×anti-CD3 composition than cynomolgus monkey PBMCs cells. Taken together, unmasked, protease-treated anti-HER2×anti-CD3 composition showed dose-dependent activity for redirected lysis with human and cynomolgus monkey PBMC cells, and reacted with HER2 antigen from both human and cynomolgus monkey species.

### Example 7: Cytotoxicity Assays of Anti-HER2×Anti-CD3 Bispecific Antigen Binding Polypeptide Composition

[0274] Redirected cellular cytotoxicity of unmasked (pJB0244A, with XTEN removed by proteolysis by MMP-9), masked (pJB0244A, having 2 XTEN and 2 release segments cleavable by proteolysis), and uncleavable (pJB0245, with 2 XTEN and the release segments replaced by a peptide not susceptible to proteolysis) anti-HER2×anti-CD3 bispecific antigen binding polypeptide compositions were assessed by using human peripheral blood mononuclear cells (PBMC) as effectors and HER2 positive human carcinoma cells such as BT-474, SK-Br-3, SK-OV-3, JIMT-1, MDA-MB-231 and MCF-7 (based on the levels of HER2 expression) as targets. PBMC were isolated from screened, healthy donors by ficoll density gradient centrifugation from either whole blood or from lymphocyte-enriched buffy coat preparations obtained from local blood banks or Bioreclamation IVT. Human PBMC cells were resuspended and cultured at appropriate cell density, as discussed below, in RPMI-1640/FBS 10% at 37° C. in a 5% CO₂ humidified incubator until use. Tumor cell lines were obtained from ATCC and grown in culture media as recommended by ATCC. A caspase Glo 3/7 assay was used for the determination of the cytolytic activity of unmasked anti-HER2×anti-CD3 composition (pJB0244A), masked (having 2 XTEN attached to antigen binding fragments via release segments) and uncleavable anti-HER2×anti-CD3 compositions (pJB0244 and pJB0245 respectively).

[0275] Caspase 3/7 assay utilizes a proluminescent caspase-3/7 DEVD-aminoluciferin substrate (“DEVD” disclosed SEQ ID NO: 1156) and a thermostable luciferase in a reagent optimized for caspase-3/7 activity, luciferase activity and cell lysis. Adding the reagent results in cell lysis, followed by caspase cleavage of the substrate. This liberates free aminoluciferin, which is consumed by the luciferase, generating a “glow-type” luminescent signal that is proportional to caspase-3/7 activity.

[0276] The cytotoxic performance of the unmasked, masked, or uncleavable anti-HER2×anti-CD3 bispecific antigen binding polypeptide compositions in all the human carcinoma cell lines was analyzed as follows: cell density of human carcinoma cells (target) and human PBMC cells(effector) was first adjusted to 5×10⁵ cells/mL and 2×10⁶ cells/mL respectively in assay medium comprised of RPMI and 10% FBS. To achieve an effector to target ratio of 5:1, 50 μL aliquots of human PBMC cells were co-cultured with 40 μL aliquots of human carcinoma cells per assay well in a 96-well round-bottom plate. Unmasked, masked, and uncleavable anti-HER2×anti-CD3 composition samples were diluted in assay medium to the desired dose concentration and added in 10 μL to the respective experimental wells, bringing the total assay volume to 100 μL. The unmasked aHER2×antiCD3 composition (e.g. pJB0244A) was evaluated as a 12-point, 5× serial diluted dose concentration starting at 1 nM to obtain a final dose range of 0.0000001 to 1 nM. The masked (e.g. pJB0244) and uncleavable (pJB0245) bispecific antigen binding polypeptide compositions were analyzed as a 12 point, 5× serial diluted dose concentration starting at 200 nM to derive at a final dose range of 0.00002 to 200 nM. Assay control for background, with no anti-HER2×anti-CD3 composition, having only target and effector cells, was also included in the assay. The plate containing experimental wells of unmasked, masked and uncleavable anti-HER2×anti-CD3 bispecific antigen binding polypeptide compositions and the respective assay controls, all tested in duplicates, was then allowed to incubate overnight in a 37° C., 5% CO₂ humidified incubator.

[0277] The amount of caspase 3/7 released into the supernatant as a result of cell lysis was measured using the Promega Caspase-Glo 3/7 Assay kit, following manufacturer's instructions. Before starting the assay, Caspase-Glo 3/7 Reagent was allowed to thaw and equilibrate to room temperature. The 96-well plate containing treated cells was removed from the incubator and allowed to equilibrate to room temperature, then 100 μl of Caspase-Glo 3/7 Reagent was added to each well in the plate. The plate was then covered, protected from light and allowed to incubate at room temperature for 30 min. After the incubation period, the contents of the wells were gently mixed using a plate shaker at 300-500 rpm for 30 seconds. Luminescence of each sample was measured in a plate-reading luminometer as directed by the luminometer manufacturer.

[0278] Data analysis was then performed as follows: dose concentrations of unmasked, masked, and uncleavable anti-HER2×anti-CD3 bispecific antigen binding polypeptide compositions were then plotted against cytotoxicity (measured in Relative Luminescence Units), and the concentration of protein that gave a half maximal response (EC50) was derived with a 4-parameter logistic regression equation using GraphPad prism software.

[0279] As shown in Table 15, when evaluated in HER2 high BT-474, SK-Br-3 and SK-OV-3 cell lines, the EC₅₀ activity of the unmasked anti-HER2×anti-CD3 bispecific antigen binding composition (pJB0244A) was in the range of 1 to 4 pM. The activity of the unmasked composition was at least 14,000-fold more active than the masked pJB0244 composition, which had an EC₅₀ activity in the range of 14,140 to 66,020 pM.

[0280] When evaluated using the HER2 mid-expression JIMT-1 cell line, the EC₅₀ activity of the unmasked pJB0244A was 52 pM, compared to an EC₅₀ activity of >200,000 pM for the masked pJB0244 and uncleavable pJB0245.

[0281] When evaluated in HER2 low-expressing cell lines such as MDA-MB-231 and MCF-7, the EC₅₀ activity of the unmasked pJB0244A was 124 pM and 139 pM respectively. Masked pJB0244 and the uncleavable pJB0245 were observed to have an EC₅₀ activity of >200,000 pM.

[0282] Conclusions: The results demonstrated that activity of unmasked anti-HER2×anti-CD3 bispecific antigen binding composition is HER2-receptor density dependent with a robust magnitude of killing in HER2-high- and HER2-mid expressing cell lines and a lower degree of killing in HER2 low-expressing cell lines. In line with the activity trend of the unmasked bispecific, the masked bispecific anti-HER2×anti-CD3 ProTIAs bearing two XTEN (pJB0244) offered strong blocking of cytotoxicity activity, with a reduced EC₅₀ activity of at least greater than 14,000-fold.

TABLE 15
Cytotoxicity determination in human carcinoma cell lines

| | | EC50 (pM) | | | | | |
|---|---|---|---|---|---|---|---|
| | Release | | | | | MDA- | |
| Construct | Segment | BT-474 | SK-Br3 | SKOV-3 | JIMT-1 | MB231 | MCF-7 |
| pJB0244A | none | 1.5 | 4 | 1 | 52 | 124 | 139 |
| pJB0244 | RSR-2295 | 66020 | 19530 | 14140 | ND | ND | ND |
| pJB0245 | RSR-3058 | ND | ND | ND | ND | ND | ND |

ND: below limits of detection

### Example 8: Cytotoxicity of Anti-HER2×Anti-CD3 Bispecific Antigen Binding Polypeptide Composition in Normal Human Breast, Skin and Lung Cell Lines

[0283] The unmasked anti-HER2×anti-CD3 bispecific antigen binding polypeptide (pJB0244A) was also evaluated in normal human primary cardiomyocytes and normal breast, normal skin and normal lung cell lines. In this experiment, effector PBMC were mixed independently with target normal human breast, skin or lung cells in a ratio of 5:1 in the same manner as described above. The HER2 high BT-474 cell line was used as a positive assay control. The unmasked anti-HER2×anti-CD3 bispecific antigen binding polypeptide was tested as a 8-point, 5× serial dilution dose curve concentration starting at 1 nM to obtain a final dose range of 0.000064 to 1 nM. The Caspase-Glo 3/7 assay was performed as described above. As expected, unmasked pJB0244A gave a robust cytotoxic activity in HER2 high BT-474 cell line with an EC5c) of 1.5 pM. Human cardiomyocytes, known to express some level of HER2, gave an EC₅₀ of 26 pM. In contrast, unmasked anti-HER2×anti-CD3 bispecific antigen binding polypeptide elicited no detectable cytotoxicity in normal breast, skin and lung cell lines using the concentrations tested (Table 16).

TABLE 16
Cytotoxicity determination in cell lines

| | EC50 (pM) | | | | |
|---|---|---|---|---|---|
| | | Normal | Normal human | Normal human | Normal human |
| Construct | BT-474 | cardiomyocytes | breast | skin | lung |
| pJB0244A | 1.5 | 26 | No cytotoxic | No cytotoxic | No cytotoxic |
| | | | activity observed | activity observed | activity observed |

### Example 9: In Vitro Caspase 3/7 Assay of Anti-EGFR×Anti-CD3 Bispecific Antigen Binding Polypeptide Compositions

[0284] Redirected cellular cytotoxicity of unmasked (with XTEN removed by proteolysis), masked (having 2 XTEN and 2 release segments cleavable by proteolysis), and uncleavable (with 2 XTEN and the release segments replaced by a peptide not susceptible to proteolysis) anti-EGFR×anti-CD3 bispecific antigen binding polypeptide compositions was assessed in an in vitro cell-based assay of caspase 3/7 activities of apoptotic cells. Similar to the caspase cytotoxicity assay described in the Examples, above, PBMC were mixed with EGFR positive tumor target cells in a ratio of 10 effector cells to 1 target cell. All anti-EGFR×anti-CD3 bispecific antigen binding polypeptide compositions were tested using a 10-point, 5× serial dilution of dose concentrations. The unmasked anti-EGFR×anti-CD3 composition was evaluated at a final dose range of 0.000012 to 10 nM. The masked and uncleavable bispecific antigen binding polypeptide compositions were analyzed at a final dose range of 0.00064 to 250 nM. Appropriate EGFR positive human tumor target cell lines included FaDu (squamous cell carcinoma of the head and neck, SCCHN), SCC-9 (SCCHN), HCT-116 (colorectal bearing KRAS mutation), NCI-H1573 (colorectal bearing KRAS mutation), HT-29 (colorectal bearing BRAF mutation) and NCI-H1975 (EGFR T790M mutation). The cell lines were selected to represent colorectal and SCCHN tumors with wild type EGFR and T790M, KRAS and BRAF mutations.

[0285] Upon cell lysis, released caspase 3/7 in culture supernatants was measured by the amount of luminogenic caspase 3/7 substrate cleavage by caspase 3/7 to generate the “glow-type” luminescent signal (Promega Caspase-Glo 3/7 cat#G8091). The amount of luminescence is proportional to the amount of caspase activities.

[0286] Results: As shown in Table 17, when evaluated in EGFR KRAS mutant HCT-116 cell line, the EC₅₀ activity of the masked anti-EGFR×anti-CD3 bispecific antigen binding polypeptide was 3,408 pM. The EC₅₀ of the uncleavable variant activity was >100,000 pM and the unmasked EC50 activity of the unmasked compositions was 0.8 pM.

[0287] When evaluated in EGFR BRAF mutant HT-29 cell line, the EC₅₀ activity of the masked anti-EGFR×anti-CD3 bispecific antigen binding polypeptide was 10,930 pM. The EC₅₀ activity of the uncleavable and unmasked compositions was >100,000 pM and 0.8 pM respectively.

[0288] The masked anti-EGFR×anti-CD3 bispecific antigen binding polypeptide was 4,000 to 14,000-fold less active than the unmasked anti-EGFR×anti-CD3 bispecific antigen binding polypeptide in the two EGFR mutant cell lines tested. As expected, the activity of the uncleavable variant was the least active of the 3 versions evaluated, with an EC50 of greater than 100,000 pM.

[0289] Conclusions: The results demonstrated that anti-EGFR×anti-CD3 bispecific antigen binding polypeptide are cytotoxically active against EGFR KRAS- and BRAF-mutant cell lines. Masked anti-EGFR×anti-CD3 bispecific antigen binding polypeptide bearing two XTEN offered strong blocking of cytotoxicity activity, with 4000- to 14,000-fold less cytotoxicity compared to the unmasked form.

TABLE 17
In vitro cytotoxicity activity of unmasked, masked/cleavable
and uncleavable anti-EGFR × anti-CD3 variants
in HT-29 and HCT-116 human cell lines

EC50 (pM)

| ProTIA | HCT-116 | HT-29 |
|---|---|---|
| Unmasked pJB0169 | 0.8 | 0.8 |
| Masked pJB0169 | 3408 | 10930 |
| Uncleavable pJB0169 | >100000 | >100000 |

### Example 10: Enzyme Activation, Storage and Digestion of RSR-1517-Containing XTEN AC1611

[0290] This example demonstrates that RSR-1517-containing XTEN construct AC1611, can be cleaved by various tumor-associated proteases including recombinant human uPA, matriptase, legumain, MMP-2, MMP-7, MMP-9, and MMP-14, in test tubes. The amino acid sequence of AC1611 is presented in Table 18, below.

[0291] 1. Enzyme Activation

[0292] All enzymes used were obtained from R&D Systems. Recombinant human u-plasminogen activator (uPA) and recombinant human matriptase were provided as activated enzymes and stored at −80° C. until use. Recombinant mouse MMP-2, recombinant human MMP-7, and recombinant mouse MMP-9 were supplied as zymogens and required activation by 4-aminophenylmercuric acetate (APMA). APMA was first dissolved in 0.1M NaOH to a final concentration of 10 mM before the pH was readjusted to neutral using 0.1M HCl. Further dilution of the APMA stock to 2.5 mM was done in 50 mM Tris pH 7.5, 150 mM NaCl, 10 mM CaCl2. To activate pro-MMP, 1 mM APMA and 100 pg/mL of pro-MMP in 50 mM Tris pH 7.5, 150 mM NaCl, 10 mM CaCl2 were incubated at 37° C. for 1 hour (MMP-2, MMP-7) or 24 hours (MMP-9). To activate MMP-14, 0.86 μg/mL recombinant human furin and 40 μg/mL pro-MMP-14 in 50 mM Tris pH 9, 1 mM CaCl2 were incubated at 37° C. for 1.5 hours. To activate legumain, 100 μg/mL pro-legumain in 50 mM sodium acetate pH 4, 100 mM NaCl were incubated at 37° C. for 2 hours. 100% Ultrapure glycerol were added to all activated enzymes (including uPA and MTSP1) to a final concentration of 50% glycerol, then be stored at −20° C. for several weeks.

[0293] 2. Enzymatic Digestion

[0294] A panel of enzymes was tested to determine cleavage efficiency of each enzyme for AC1611. 6 μM of the substrate was incubated with each enzyme in the following enzyme-to-substrate molar ratios and conditions: uPA (1:25 in 50 mM Tris pH 8.5), matriptase (1:25 in 50 mM Tris pH 9, 50 mM NaCl), legumain (1:20 in 50 mM MES pH 5, 250 mM NaCl), MMP-2 (1:1200 in 50 mM Tris pH 7.5, 150 mM NaCl, 10 mM CaCl2), MMP-7 (1:1200 in 50 mM Tris pH 7.5, 150 mM NaCl, 10 mM CaCl2), MMP-9 (1:2000 in 50 mM Tris pH 7.5, 150 mM NaCl, 10 mM CaCl2), and MMP-14 (1:30 in 50 mM Tris pH 8.5, 3 mM CaCl2, 1 μM ZnCl2) in 20 μL reactions. Reactions were incubated at 37° C. for two hours before stopped by adding EDTA to 20 mM in the case of MMP reactions, heating at 85° C. for 15 minutes in the case of uPA and matriptase reactions and adjusting pH to 8.5 in the case of legumain.

[0295] 3. Analysis of Cleavage Efficiency.

[0296] Analysis of the samples to determine percentage of cleaved product was performed by loading 2 μL of undigested substrate (at 12 μM) and 4 μL digested (at 6 μM) reaction mixture on SDS-PAGE and staining with Stains-All (Sigma Aldrich). ImageJ software was used to analyze corresponding band intensity and determine percent of cleavage. Upon cleavage by various proteases at the release segment, the substrate RSR-1517-containing XTEN would yield two fragments, and the larger fragment was utilized in % cleavage calculations (quantity of reaction product divided by total initial substrate went into the reaction) while band intensity of the smaller product is too low to quantify. The percentage of cleavage of AC1611 under the current standard experimental conditions is 31%, 14%, 16%, 40%, 51%, 38%, 30%, for uPA, matriptase, legumain, MMP-2, MMP-7, MMP-9, MMP-14, respectively.

[0297] Conclusions: We selected a particular release segment RSR-1517 (amino acid sequence EAGRSANHEPLGLVAT (SEQ ID NO: 42)) and determined its cleavage profile as defined by percentage of cleavage under current standard experimental condition for all seven enzymes. This release segment has intermediate cleavage efficiency for all enzymes so that during screening, cleavage of faster or slower variants will fall within the assay window to allow accurate ranking.

TABLE 18
Amino acid sequence of AC1611
with Release Segment RSR-1517

| Construct | | SEQ ID |
|---|---|---|
| Name | Amino Acid Sequence* | NO: |
| AC1611 | MKNPEQAEEQAEEQREETGKPIPNP | 1139 |
| | LLGLDSTEGTSTEPSEGSAPGTSES | |
| | ATPESGPGTSESATPESGPGTSESA | |
| | TPESGPGSEPATSGSETPGSEPATS | |
| | GSETPGSPAGSPTSTEEGTSTEPSE | |
| | GSAPGTSTEPSEGSAPGSEPATSGS | |
| | ETPGTSESATPESGPGTAEAASASG | |
| | EAGRSANHEPLGLVATPGSPAGSPT | |
| | STEEGTSESATPESGPGTSTEPSEG | |
| | SAPGSPAGSPTSTEEGTSTEPSEGS | |
| | APGTSTEPSEGSAPGTSESATPESG | |
| | PGSEPATSGSETPGSEPATSGSETP | |
| | GSPAGSPTSTEEGTSESATPESGPG | |
| | TSTEPSEGSAPGTSTEPSEGSAPGS | |
| | PAGSPTSTEEGTSTEPSEGSAPGTS | |
| | TEPSEGSAPGTSESATPESGPGTST | |
| | EPSEGSAPGTSESATPESGPGSEPA | |
| | TSGSETPGTSTEPSEGSAPGTSTEP | |
| | SEGSAPGTSESATPESGPGTSESAT | |
| | PESGPGSPAGSPTSTEEGTSESATP | |
| | ESGPGSEPATSGSETPGTSESATPE | |
| | SGPGTSTEPSEGSAPGTSTEPSEGS | |
| | APGTSTEPSEGSAPGTSTEPSEGSA | |
| | PGTSTEPSEGSAPGTSTEPSEGSAP | |
| | GSPAGSPTSTEEGTSTEPSEGSAPG | |
| | TSESATPESGPGSEPATSGSETPGT | |
| | SESATPESGPGSEPATSGSETPGTS | |
| | ESATPESGPGTSTEPSEGSAPGTSE | |
| | SATPESGPGSPAGSPTSTEEGSPAG | |
| | SPTSTEEGSPAGSPTSTEEGTSESA | |
| | TPESGPGTSTEPSEGSAPGTSESAT | |
| | PESGPGSEPATSGSETPGTSESATP | |
| | ESGPGSEPATSGSETPGTSESATPE | |
| | SGPGTSTEPSEGSAPGSPAGSPTST | |
| | EEGTSESATPESGPGSEPATSGSET | |
| | PGTSESATPESGPGSPAGSPTSTEE | |
| | GSPAHHHHHHHH | |

### Example 11: Screening Release Segment Using RSR-1517 (AC1611) as Control

[0298] Here we select uPA as the example to show how the release segment screening was performed. The same procedure was applied to all seven tumor-associated proteases to define the relative cleavage profile for each substrate, which is a seven-number array to describe how well it can be cleaved for each enzyme, when compared to the control substrate RSR-1517. All polypeptides of Table 19 had the amino acid sequence of AC1611 but with the substitution of the release segment peptide of the indicated construct swapped in for the EAGRSANHEPLGLVAT sequence of AC1611 (SEQ ID NO: 42); e.g., BSRS-4 has a release segment sequence of LAGRSDNHSPLGLAGS (SEQ ID NO: 1157) but otherwise has complete sequence identity to AC1611.

[0299] 1. Enzymatic Digestion

[0300] All release segment-containing XTEN variants and the control AC1611 were diluted to 12 μM in 50 mM Tris pH 7.5, 150 mM NaCl, 10 mM CaCl2 in individual Eppendorf tubes. A master mix of uPA was prepared so that after 1:1 mixing with each substrate, the total reaction volume is 20 μL, the initial substrate concentration is 6 μM, and the enzyme-to-substrate ratio was varied between 1:20 to 1:3000, depending on the enzyme, in order to have reaction products and uncleaved substrate that could be visualized at the endpoint. All reactions were incubated at 37° C. for 2 hours before stopped by adding EDTA to a final concentration of 20 mM. All products were analyzed by non-reducing SDS-PAGE followed by Stains-All. For each gel, AC1611 digestion product was always included as the staining control to normalize differential staining between different gels.

[0301] 2. Relative Cleavage Efficiency Calculation

[0302] Percentage of cleavage for individual substrate was analyzed by ImageJ software and calculated as described before. For each variant, the relative cleavage efficiency is calculated as follows:

$${Log}_{2} ( \frac{\% Cleaved for substrate of interest}{\% cleaved for AC 1611 in the same experiment} )$$

[0303] A +1 value in relative cleavage efficiency indicates the substrate yielded twice as much product when compared to the AC1611 control while a −1 value in relative cleavage efficiency indicates the substrate yielded only 50% as much product when compared to the AC1611 control, under the experimental condition specified above.

[0304] In this experiment, the percentage of cleavage (% cleaved) for AC1611 is 20%, as quantified by ImageJ. The substrates being screened in this experiment demonstrated 21%, 39%, 1%, 58%, 24%, 6%, 15%, 1%, 1%, and 25% cleavage, where 1% essentially represents below detection limit and does not indicate accurate values. The relative cleavage efficiencies calculated based on the formula above were 0.08, 0.95, −4.34, 1.51, 0.26, −1.76, −0.47, −4.34, −4.34, and 0.32, respectively.

[0305] Conclusions: We determined relative cleavage efficiencies of 10 release segment variants when subject to uPA when compared to AC1611 in the same experiment. Following similar procedures, we determined the cleavage profiles of 134 release segments, the results of which are listed in Table 19, using RSR1517 (AC1611) as the reference control. These release segments covers a wide range of cleavage efficiency for individual enzyme as well as combinations. For example, RSR-1478 has a −2.00 value for MMP-14, meaning that this substrate yielded only 25% of product compared to the reference control RSR-1517 when digested with MMP-14. Certain release segments, such as RSR-1951, appear to be better substrate for all seven proteases tested. These faster release segments may prove to be useful in the clinic if the systemic toxicity is low/manageable while efficacy (partially depending on how fast cleavage happens to render bispecific antigen binding polypeptide as the activated form) needs improvement.

TABLE 19
Cleavage profiles of Release Segment when subjected to seven
human proteases using RSR-1517 as control

| | | | SEQ | | | | | | | |
|---|---|---|---|---|---|---|---|---|---|---|
| | | | ID | | | | | | | |
| RS ID | AC# | AA Sequence | NO: | uPA | Matriptase | Legumain | MMP-2 | MMP-7 | MMP-9 | MMP-14 |
| RSR-1517 | AC1611 | EAGRSANHEPLGLVAT | 42 | 0 | 0 | 0 | 0 | 0 | 0 | 0 |
| BSRS-4 | AC1602 | LAGRSDNHSPLGLAGS | 1157 | −0.99 | 1.69 | 0.48 | 0.09 | −0.49 | −0.04 | −0.58 |
| BSRS-5 | AC1603 | LAGRSDNHVPLSLSMG | 1158 | −1.4 | 1.76 | 0.56 | −0.52 | 0 | −0.75 | −0.21 |
| BSRS-6 | AC1604 | LAGRSDNHEPLELVAG | 1159 | −2.71 | 0.47 | 0.23 | −1.26 | 0 | −1.16 | −2.79 |
| BSRS-A1 | AC1605 | ASGRSTNAGPSGLAGP | 43 | 1.43 | 2.77 | 0.09 | −0.16 | −2.18 | 0.03 | −1.24 |
| BSRS-A2 | AC1606 | ASGRSTNAGPQGLAGQ | 44 | 1.36 | 2.77 | −0.14 | 0.09 | −2.64 | 0.03 | −1.03 |
| BSRS-A3 | AC1607 | ASGRSTNAGPPGLTGP | 45 | 1.49 | 2.77 | 0.05 | −1.07 | −3.47 | −1.82 | −3.59 |
| VP-1 | AC1608 | ASSRGTNAGPAGLTGP | 46 | −2.19 | 1.16 | 0.9 | 0.09 | −1.22 | 0.23 | 0 |
| RSR-1752 | AC1609 | ASSRTTNTGPSTLTGP | 47 | −0.55 | 0.7 | 0.29 | −0.34 | −1.29 | −0.94 | −5.38 |
| RSR-1512 | AC1610 | AAGRSDNGTPLELVAP | 48 | −2.96 | 1.51 | 0.56 | −1.43 | −0.45 | −1.09 | −3.91 |
| RSR-1517 | AC1611 | EAGRSANHEPLGLVAT | 42 | 0 | 0 | 0 | 0 | 0 | 0 | 0 |
| VP-2 | AC1612 | ASGRGTNAGPAGLTGP | 49 | −0.7 | 1.38 | 1.12 | 0 | −0.58 | 0.23 | −0.15 |
| RSR-1018 | AC1613 | LFGRNDNHEPLELGGG | 50 | −4.62 | −0.53 | 1.36 | −0.73 | −0.43 | −2.56 | −1.79 |
| RSR-1053 | AC1614 | TAGRSDNLEPLGLVFG | 51 | −3.21 | −0.12 | −0.13 | 0.09 | −0.03 | 0.25 | −0.19 |
| RSR-1059 | AC1615 | LDGRSDNFHPPELVAG | 52 | −4.62 | −0.89 | 0.56 | −3.1 | −2.62 | −5.14 | −6.49 |
| RSR-1065 | AC1616 | LEGRSDNEEPENLVAG | 53 | −4.62 | −2.7 | 0.43 | −1.84 | −1 | −3.14 | −1.85 |
| RSR-1167 | AC1617 | LKGRSDNNAPLALVAG | 54 | −4.62 | 3.35 | 1.32 | 0.09 | 0.22 | 1.18 | 0.06 |
| RSR-1201 | AC1618 | VYSRGTNAGPHGLTGR | 55 | −3.02 | 2.35 | 1.25 | 0.09 | −1.3 | 0.79 | −0.3 |
| RSR-1218 | AC1619 | ANSRGTNKGFAGLIGP | 56 | −0.52 | 2.66 | 1.74 | −0.3 | 0 | −1.33 | −1.6 |
| RSR-1226 | AC1620 | ASSRLTNEAPAGLTIP | 57 | −0.98 | 0.29 | 0.58 | 0.07 | −0.43 | −2.33 | −0.42 |
| RSR-1254 | AC1621 | DQSRGTNAGPEGLTDP | 58 | −1.27 | −1.17 | 1 | −3.1 | −2.32 | −4.14 | −2.92 |
| RSR-1256 | AC1622 | ESSRGTNIGQGGLTGP | 59 | −1.65 | −0.58 | 0.27 | −2.26 | −3.32 | −5.14 | −5.51 |
| RSR-1261 | AC1623 | SSSRGTNQDPAGLTIP | 60 | −1.77 | −0.36 | 0.62 | −1.14 | −1.25 | −3.56 | −0.98 |
| RSR-1293 | AC1624 | ASSRGQNHSPMGLTGP | 61 | −4.69 | 2.15 | 0.91 | −0.7 | −0.01 | 1.3 | −0.67 |
| RSR-1309 | AC1625 | AYSRGPNAGPAGLEGR | 62 | −4.69 | 0.53 | 0.74 | −0.7 | −2.25 | 0.86 | 0.02 |
| RSR-1326 | AC1626 | ASERGNNAGPANLTGF | 63 | −0.27 | 1.27 | 1.64 | −0.85 | −0.74 | 0.28 | −0.13 |
| RSR-1345 | AC1627 | ASHRGTNPKPAILTGP | 64 | 0.42 | ND | ND | ND | ND | −0.5 | ND |
| RSR-1354 | AC1628 | MSSRRTNANPAQLTGP | 65 | 1.07 | 2.82 | 0.36 | −0.77 | −0.64 | −1.82 | −1.87 |
| RSR-1426 | AC1629 | GAGRTDNHEPLELGAA | 66 | −2.36 | −0.65 | −0.19 | −2.82 | −0.18 | −0.11 | −4.07 |
| RSR-1478 | AC1630 | LAGRSENTAPLELTAG | 67 | −2.06 | 1.18 | 0.54 | −0.82 | 0 | 1.73 | −2 |
| RSR-1479 | AC1631 | LEGRPDNHEPLALVAS | 68 | −3.47 | −3.46 | 0.12 | −0.74 | 0 | 2.05 | 0.02 |
| RSR-1496 | AC1632 | LSGRSDNEEPLALPAG | 69 | −3.48 | −1.46 | 0.22 | −2.81 | −5.06 | −3.2 | −3.22 |
| RSR-1508 | AC1633 | EAGRTDNHEPLELSAP | 70 | −2.74 | −1.46 | −0.26 | −1.48 | 0 | 0.56 | −2.93 |
| RSR-1513 | AC1634 | EGGRSDNHGPLELVSG | 71 | −2.81 | −1.87 | 0.27 | −0.9 | 0 | 1.29 | −3.81 |
| RSR-1516 | AC1635 | LSGRSDNEAPLELEAG | 72 | −3.71 | −1.87 | 0.7 | −1.69 | −0.09 | −1.39 | −3.22 |
| RSR-1524 | AC1636 | LGGRADNHEPPELGAG | 73 | −0.84 | 1.12 | 0.95 | −1.22 | −2.84 | −0.74 | −2.57 |
| RSR-1622 | AC1637 | PPSRGTNAEPAGLTGE | 74 | −4.66 | −3.46 | 0.62 | −0.7 | −1.09 | 0.93 | −0.78 |
| RSR-1629 | AC1638 | ASTRGENAGPAGLEAP | 75 | −4.66 | −1.14 | 1.09 | −0.7 | −1.74 | 0.19 | −0.25 |
| RSR-1664 | AC1639 | ESSRGTNGAPEGLTGP | 76 | −4.66 | −3.46 | 0.32 | −1.18 | −0.76 | −0.76 | −2.31 |
| RSR-1667 | AC1640 | ASSRATNESPAGLTGE | 77 | −3.05 | 2 | 0.46 | −0.93 | −1.25 | −0.97 | −0.83 |
| RSR-1709 | AC1641 | ASSRGENPPPGGLTGP | 78 | −2.64 | 0.77 | −1 | −0.93 | −2.06 | −0.76 | −1.72 |
| RSR-1712 | AC1642 | AASRGTNTGPAELTGS | 79 | −4.07 | −0.51 | 0.66 | −0.93 | −0.64 | 0.29 | −0.19 |
| RSR-1727 | AC1643 | AGSRTTNAGPGGLEGP | 80 | −3.55 | −0.51 | 0.32 | −1.58 | −4.84 | −3.08 | −1.78 |
| RSR-1754 | AC1644 | APSRGENAGPATLTGA | 81 | −4.68 | −3.32 | 1.06 | 0.19 | −1.4 | −1.5 | −0.17 |
| RSR-1819 | AC1645 | ESGRAANTGPPTLTAP | 82 | 1.2 | 0.79 | −0.7 | −3.41 | −5.64 | −4.67 | −6.92 |
| RSR-1832 | AC1646 | NPGRAANEGPPGLPGS | 83 | −3.62 | 0.58 | 0.81 | −4.39 | −6.64 | −4.67 | −6.48 |
| RSR-1855 | AC1647 | ESSRAANLTPPELTGP | 84 | −0.08 | −1.62 | 0.77 | −3.07 | −3.47 | −4.67 | −2.92 |
| RSR-1911 | AC1648 | ASGRAANETPPGLTGA | 85 | 0.99 | 2.2 | 0.56 | −1.29 | −3.84 | −1.39 | −3.11 |
| RSR-1929 | AC1649 | NSGRGENLGAPGLTGT | 86 | −1.68 | ND | ND | ND | ND | −3.08 | ND |
| RSR-1951 | AC1650 | TTGRAANLTPAGLTGP | 87 | 1.94 | 2.57 | 0.39 | 0.09 | −0.09 | 0.13 | −0.42 |
| RSR-2295 | AC1761 | EAGRSANHTPAGLTGP | 88 | 0.4 | 1.48 | 0.01 | 1.2 | 0.35 | 0.13 | 0.97 |
| RSR-2298 | AC1762 | ESGRAANTTPAGLTGP | 89 | 1.01 | 0.86 | 0.55 | 1.24 | 0.24 | 0.07 | 1.03 |
| RSR-2038 | AC1679 | TTGRATEAANLTPAGLTGP | 90 | 4.75 | 1 | 0.81 | 0.86 | 0.1 | 0.15 | 0.27 |
| RSR-2072 | AC1680 | TTGRAEEAANLTPAGLTGP | 91 | 0 | −0.49 | 1 | 0.86 | 0.11 | −0.12 | 0.27 |
| RSR-2089 | AC1681 | TTGRAGEAANLTPAGLTGP | 92 | 3.91 | 2.05 | 0.32 | 0.85 | 0.02 | −0.04 | 0.27 |
| RSR-2302 | AC1682 | TTGRATEAANATPAGLTGP | 93 | 4.73 | 0.65 | 0 | 0.74 | −0.48 | −0.35 | 0.1 |
| RSR-3047 | AC1697 | TTGRAGEAEGATSAGATGP | 94 | | | | | | | |
| RSR-3052 | AC1698 | TTGEAGEAANATSAGATGP | 95 | | | | | | | |
| RSR-3043 | AC1699 | TTGEAGEAAGLTPAGLTGP | 96 | | | | | | | |
| RSR-3041 | AC1700 | TTGAAGEAANATPAGLTGP | 97 | | | | | | | |
| RSR-3044 | AC1701 | TTGRAGEAAGLTPAGLTGP | 98 | | | | | | | |
| RSR-3057 | AC1702 | TTGRAGEAANATSAGATGP | 99 | | | | | | | |
| RSR-3058 | AC1703 | TTGEAGEAAGATSAGATGP | 100 | | | | | | | |
| RSR-2485 | AC1763 | ESGRAANTEPPELGAG | 101 | 0.61 | −0.9 | 0.15 | −5.82 | −6.27 | −5.36 | −5.64 |
| RSR-2486 | AC1764 | ESGRAANTAPEGLTGP | 102 | 1.03 | 0.24 | 0.95 | 0.3 | 0.37 | −0.33 | −0.74 |
| RSR-2488 | AC1688 | EPGRAANHEPSGLTEG | 103 | −3.27 | −1.21 | −1.3 | −0.73 | −0.91 | −1.86 | −0.88 |
| RSR-2599 | AC1706 | ESGRAANHTGAPPGGLTGP | 104 | 1.7 | 1.02 | 0.36 | 0.68 | −1.49 | −0.71 | −2.04 |
| RSR-2706 | AC1716 | TTGRTGEGANATPGGLTGP | 105 | 0.07 | 0.83 | 1.17 | −0.04 | −2.25 | −2.25 | 0 |
| RSR-2707 | AC1717 | RTGRSGEAANETPEGLEGP | 106 | 1.95 | 3.25 | 0.96 | −1.96 | −2.75 | −5 | −1.39 |
| RSR-2708 | AC1718 | RTGRTGESANETPAGLGGP | 107 | 1.24 | 3.25 | 0.88 | −0.37 | −3.55 | −4 | −0.49 |
| RSR-2709 | AC1719 | STGRTGEPANETPAGLSGP | 108 | −0.14 | 0.38 | 0.4 | 0.35 | −1.03 | −1.68 | 1.86 |
| RSR-2710 | AC1720 | TTGRAGEPANATPTGLSGP | 109 | −0.21 | 2.04 | 0.56 | 0.15 | −3.23 | −1.83 | −0.07 |
| RSR-2711 | AC1721 | RTGRPGEGANATPTGLPGP | 110 | 0.58 | 3.22 | 1.45 | −6.04 | −5.55 | −5 | −4.39 |
| RSR-2712 | AC1722 | RTGRGGEAANATPSGLGGP | 111 | 0.86 | 3.15 | 1.21 | −0.34 | −3.97 | −2.68 | −1.58 |
| RSR-2713 | AC1723 | STGRSGESANATPGGLGGP | 112 | 0.96 | 2.22 | 0.78 | −5.04 | −5.25 | −5.25 | −3.32 |
| RSR-2714 | AC1724 | RTGRTGEEANATPAGLPGP | 113 | 0.83 | 3.23 | 0.96 | −4.46 | −5.55 | −5 | −4.39 |
| RSR-2715 | AC1725 | ATGRPGEPANTTPEGLEGP | 114 | −4.32 | −3.17 | 0.46 | −1.34 | −1.93 | −1.93 | −1.32 |
| RSR-2716 | AC1726 | STGRSGEPANATPGGLTGP | 115 | 1 | 2.41 | 0.51 | −0.46 | −3.55 | −2.68 | −1.22 |
| RSR-2717 | AC1727 | PTGRGGEGANTTPTGLPGP | 116 | −0.21 | 1.54 | 1.28 | −6.04 | −5.55 | −5 | −4.39 |
| RSR-2718 | AC1728 | PTGRSGEGANATPSGLTGP | 117 | 1.54 | 3.4 | 1.29 | 1.3 | −0.2 | −0.2 | 1.63 |
| RSR-2719 | AC1729 | TTGRASEGANSTPAPLTEP | 118 | 0.26 | 1.15 | 1.3 | −1.46 | −0.16 | −0.16 | 1.68 |
| RSR-2720 | AC1730 | TYGRAAEAANTTPAGLTAP | 119 | −1.65 | 2.14 | 1.21 | 0.56 | 0.45 | 0.21 | 2.25 |
| RSR-2721 | AC1731 | TTGRATEGANATPAELTEP | 120 | 0.77 | −0.85 | 1.25 | −2.44 | 0 | −4.91 | −3.75 |
| RSR-2722 | AC1732 | TVGRASEEANTTPASLTGP | 121 | −1.74 | −1.17 | 0.39 | 1.08 | 1 | 1 | 2.14 |
| RSR-2723 | AC1733 | TTGRAPEAANATPAPLTGP | 122 | −0.42 | −3.17 | 1.32 | 0.76 | 0.66 | 0.66 | 2.17 |
| RSR-2724 | AC1734 | TWGRATEPANATPAPLTSP | 123 | −4.32 | 1 | 0.55 | 0.81 | 0.42 | 0.42 | 2.58 |
| RSR-2725 | AC1735 | TVGRASESANATPAELTSP | 124 | −4.32 | −0.17 | 0.86 | −0.02 | 0.45 | −1.74 | −2.17 |
| RSR-2726 | AC1736 | TVGRAPEGANSTPAGLTGP | 125 | −4.32 | −3.17 | 1.39 | 1.22 | 0.24 | 0.24 | 2.1 |
| RSR-2727 | AC1737 | TWGRATEAPNLEPATLTTP | 126 | −4.32 | 0 | −0.3 | −0.5 | 0.17 | −3.91 | −1.95 |
| RSR-2728 | AC1738 | TTGRATEAPNLTPAPLTEP | 127 | 0.32 | 0.83 | −0.61 | −0.8 | 0.45 | 0.45 | 2 |
| RSR-2729 | AC1739 | TQGRATEAPNLSPAALTSP | 128 | −4.52 | 1.73 | 0.37 | 1.75 | 0.93 | 0.93 | 2.85 |
| RSR-2730 | AC1740 | TCGRAAEAPNLTPATLTAP | 129 | −2.2 | 2.73 | 0.22 | 1.19 | 0.51 | 0.51 | 1.29 |
| RSR-2731 | AC1741 | TSGRAPEATNLAPAPLTGP | 130 | −1.72 | −2.7 | 1.22 | 1.57 | 0.92 | 0.92 | 2.32 |
| RSR-2732 | AC1742 | TQGRAAEAANLTPAGLTEP | 131 | −2.52 | 2.49 | 1.44 | 0.32 | −0.21 | −0.21 | 2.29 |
| RSR-2733 | AC1743 | TTGRAGSAPNLPPTGLTTP | 132 | 1.09 | 2.91 | 0.32 | 0.48 | −2.32 | −2.32 | −3.17 |
| RSR-2734 | AC1744 | TTGRAGGAENLPPEGLTAP | 133 | 0.83 | 2 | 0.66 | 0.55 | 0.55 | 0.55 | 1.83 |
| RSR-2735 | AC1745 | TTSRAGTATNLTPEGLTAP | 134 | 0.38 | 2.34 | 0.32 | 0.48 | 0.26 | 0.26 | 2.12 |
| RSR-2736 | AC1746 | TTGRAGTATNLPPSGLTTP | 135 | 1.03 | 2.91 | 0.17 | 1.34 | −1.1 | −1.1 | 1.42 |
| RSR-2737 | AC1747 | TTARAGEAENLSPSGLTAP | 136 | −0.2 | 0.3 | 0.37 | 1.57 | −0.03 | −0.03 | 2.35 |
| RSR-2738 | AC1748 | TTGRAGGAGNLAPGGLTEP | 137 | 1.68 | 3.37 | 1.03 | −1.32 | −1.65 | −2.1 | −1.05 |
| RSR-2739 | AC1749 | TTGRAGTATNLPPEGLTGP | 138 | 1 49 | 3.43 | 0.31 | −0.12 | 0.71 | −0.58 | −0.67 |
| RSR-2740 | AC1750 | TTGRAGGAANLAPTGLTEP | 139 | 1.77 | 3.38 | 1.49 | −1.02 | −0.75 | −1.32 | −0.43 |
| RSR-2741 | AC1751 | TTGRAGTAENLAPSGLTTP | 140 | 0.68 | 3.1 | 0.56 | 0.58 | −0.51 | −0.91 | 0.42 |
| RSR-2742 | AC1752 | TTGRAGSATNLGPGGLTGP | 141 | 1.43 | 3.42 | 0.51 | −0.27 | −3.23 | −2.32 | −0.17 |
| RSR-2743 | AC1753 | TTARAGGAENLTPAGLTEP | 142 | 1.63 | 2.19 | 0.78 | −0.5 | −0.13 | −2.58 | 1.18 |
| RSR-2744 | AC1754 | TTARAGSAENLSPSGLTGP | 143 | 1.04 | 2.32 | 0.65 | 0.59 | 0 | −0.15 | 0.49 |
| RSR-2745 | AC1755 | TTARAGGAGNLAPEGLTTP | 144 | 1.12 | 2.77 | 0.4 | −0.77 | −0.58 | −2.28 | −1 |
| RSR-2746 | AC1756 | TTSRAGAAENLTPTGLTGP | 145 | −0.81 | 1.54 | 0.18 | 0.42 | −0.85 | −1.5 | −0.26 |
| RSR-2747 | AC1757 | TYGRTTTPGNEPPASLEAE | 146 | −1.49 | 1.26 | 0.06 | −0.2 | −0.36 | −2.77 | −2.1 |
| RSR-2748 | AC1758 | TYSRGESGPNEPPPGLTGP | 147 | −4.81 | −2.32 | −0.76 | −0.28 | −2.68 | −2.28 | −2.91 |
| RSR-2749 | AC1759 | AWGRTGASENETPAPLGGE | 148 | −4.81 | 3.15 | 0.24 | −1.28 | −3.91 | −5.09 | −2.58 |
| RSR-2750 | AC1760 | RWGRAETTPNTPPEGLETE | 149 | −1.49 | 3.28 | −0.29 | −3.17 | −3.91 | −5.09 | −4.91 |
| RSR-2751 | AC1765 | ESGRAANHTGAEPPELGAG | 150 | 1.04 | 0.37 | 0.4 | −1.59 | −5.67 | −5.26 | −4.93 |
| RSR-2754 | AC1801 | TTGRAGEAANLTPAGLTES | 151 | | | | −0.15 | −0.82 | −3.61 | 0.45 |
| RSR-2755 | AC1802 | TTGRAGEAANLTPAALTES | 152 | | | | 0.06 | 0.29 | −2.91 | 0.62 |
| RSR-2756 | AC1803 | TTGRAGEAANLTPAPLTES | 153 | | | | −0.58 | −0.39 | −2.58 | 0.49 |
| RSR-2757 | AC1804 | TTGRAGEAANLTPEPLTES | 154 | | | | −1.59 | −0.27 | −1.89 | −0.52 |
| RSR-2758 | AC1805 | TTGRAGEAANLTPAGLTGA | 155 | | | | 0.7 | −0.43 | 0.17 | 0.85 |
| RSR-2759 | AC1806 | TTGRAGEAANLTPEGLTGA | 156 | | | | 0.04 | −0.72 | −1.06 | −0.18 |
| RSR-2760 | AC1807 | TTGRAGEAANLTPEPLTGA | 157 | | | | −0.06 | −0.12 | −1.9 | −0.15 |
| RSR-2761 | AC1808 | TTGRAGEAANLTPAGLTEA | 158 | | | | −0.06 | −0.55 | −3.71 | 0.69 |
| RSR-2762 | AC1809 | TTGRAGEAANLTPEGLTEA | 159 | | | | −2.14 | −0.69 | −4.3 | −0.59 |
| RSR-2763 | AC1810 | TTGRAGEAANLTPAPLTEA | 160 | | | | −0.76 | −0.31 | −5.28 | 0.64 |
| RSR-2764 | AC1811 | TTGRAGEAANLTPEPLTEA | 161 | | | | −2.18 | −0.06 | −5.28 | −0.11 |
| RSR-2765 | AC1812 | TTGRAGEAANLTPEPLTGP | 162 | | | | −0.31 | 0.07 | −5.28 | −5.63 |
| RSR-2766 | AC1813 | TTGRAGEAANLTPAGLTGG | 163 | | | | 0.77 | −0.61 | −5.28 | −5.63 |
| RSR-2767 | AC1814 | TTGRAGEAANLTPEGLTGG | 164 | | | | −0.2 | −0.85 | −1.26 | −0.25 |
| RSR-2768 | AC1815 | TTGRAGEAANLTPEALTGG | 165 | | | | −0.5 | 0.13 | −1.8 | −0.43 |
| RSR-2769 | AC1816 | TTGRAGEAANLTPEPLTGG | 166 | | | | −0.44 | −0.26 | −2.4 | −0.39 |
| RSR-2770 | AC1817 | TTGRAGEAANLTPAGLTEG | 167 | | | | −0.07 | −0.47 | −3.18 | 0.4 |
| RSR-2771 | AC1818 | TTGRAGEAANLTPEGLTEG | 168 | | | | −3.05 | −0.93 | −5.28 | −0.99 |
| RSR-2772 | AC1819 | TTGRAGEAANLTPAPLTEG | 169 | | | | −0.53 | −0.24 | −2.19 | 0.39 |
| RSR-2773 | AC1820 | TTGRAGEAANLTPEPLTEG | 170 | | | | −3.8 | −0.42 | −5.28 | −0.81 |
| BSRS-1 | AC1601 | LSGRSDNHSPLGLAGS | 1152 | 0.89 | 1.94 | 0.1 | −0.67 | −2.12 | −0.5 | −1.92 |

ND = not determined

### Example 12: Competitive Digestion Using RSR-1517 as Internal Control

[0306] This competitive assay is developed to minimize any variability in enzyme concentration or reaction condition between reactions in different vials within the same experiment. In order to resolve both the control substrate and the RS of interest in the same example, new control plasmids are constructed.

[0307] 1. Molecular Cloning of RSR-1517-Containing Internal Control

[0308] Two internal control plasmids, AC1830 (HD2-V5-AE144-RSR-1517-XTEN288) and AC1840 (HD2-V5-AE144-RSR-1517-XTEN432), are constructed in a similar fashion as AC1611 described in Example 10, with the only difference in the length of the C-terminal XTEN.

[0309] 2. Enzymatic Digestion

[0310] 2× substrate solution is prepared by mixing and diluting purified AC1830 or AC1840 and the RS of interest in assay buffer so that the final concentrations of individual substrates are 6 μM. An enzyme master mix is prepared so that after 1:1 mixing with 2× substrate solution, the total reaction volume is 20 μL, the final substrate concentration of each component is 3 μM, and the enzyme-to-substrate ratio is as selected in assay development. The reaction is incubated at 37° C. for 2 hours before stopped by procedures as described above.

[0311] 3. Relative Cleavage Efficiency Calculation

[0312] The reaction mixture is analyzed by non-reducing 4-12% SDS-PAGE. Since the internal control and the substrate of interest have different molecular weight, once cleaved, four bands should be visible in the same sample lane. Percentage of cleavage for both can be calculated and the relative cleavage efficiency can be derived from the same formula in Example 10:

$${Log}_{2} ( \frac{\% Cleaved for substrate of interest}{\% cleaved for AC 1611 in the same experiment} )$$

[0313] The only difference is now both values are calculated from the reaction mixture in the same vial, while previously from two reactions sharing the same enzyme mix.

[0314] Conclusions: We expect this competitive digestion assay with RSR-1517 as internal control to have less assay-to-assay variability when compared to the assay described in Example 10. We anticipate adopting this method for future release segment screening.

### Example 11A: Anti-Tumor Properties of Anti-EpCAM x Anti-CD3 Bispecific Antigen Binding Polypeptide Bearing One or Two XTEN in Established Breast Tumor Model

[0315] In the established breast tumor model, BT-474 tumor cells were independently implanted, in the presence of matrigel, subcutaneously into NOG (NOD/Shi-scid/IL-2Rγ^{null}) or NSG (NOD.Cg-Prkdc^{scid}.IL2rg^{tmlWjl}/SzJ) mice on day 0. (The NOG or NSG mice are NOD/SCID mice bearing IL-2Rγ mutation resulting in the mice lacking T, B and NK cells, dysfunctional macrophage, dysfunctional dendritic cells and reduced complement activity.) Human PBMCs were then intravenously introduced when BT-474 tumor volume reached 100-200 mm³. Treatment with vehicle, protease-untreated anti-EpCAM×anti-CD3 bispecific antigen binding polypeptide carrying one XTEN polymer (e.g. pJB0189) and an anti-EpCAM×anti-CD3 bispecific antigen binding polypeptide bearing two XTEN polymers (e.g. pJB0176) was initiated intravenously as three doses per week for four weeks. Cohort 1 was the vehicle-treated group, cohort 2 was the pJB0189-treated group at 0.5 mg/kg, and cohort 3 was the pJB0176-treated group at 0.5 mg/kg.

[0316] Tumors were measured twice per week for a projected 45 days with a caliper in two perpendicular dimensions and tumor volumes were calculated by applying the (width²×length)/2 formula. Body weight, general appearance and clinical observations such as seizures, tremors, lethargy, hyper-reactivity, pilo-erection, labored/rapid breathing, coloration and ulceration of tumor and death were also closely monitored as a measure of treatment related toxicity. Percent tumor growth inhibition index (% TGI) was calculated for each of the treatment group by applying the formula: ((Mean tumor volume of Group 2 vehicle control—Mean tumor volume of bispecific antigen binding polypeptide treatment)/mean tumor volume of Group 2 vehicle control)×100. Treatment group with % TGI≥60% is considered therapeutically active.

[0317] Results: At interim day 27, vehicle-treated cohort 1 mice did not inhibit tumor progression having a tumor burden of 219±30 mm³, demonstrating that human effector cells alone as such could not elicit an anti-tumor effect. As expected, treatment with pJB0189 anti-EpCAM×anti-CD3 bispecific antigen binding polypeptide at 0.5 mg/kg (cohort 2) in the presence of human effector cells exhibited clear anti-tumor regression with % TGI of 68%. Importantly, treatment with pJB0176 anti-EpCAM×anti-CD3 bispecific antigen binding polypeptide at 0.5 mg/kg (cohort 3) in the presence of human effector cells also elicited a robust anti-tumor response yielding a % TGI of 76%.

[0318] Conclusions: Interim data suggest that at 0.5 mg/kg in the in vivo BT-474 tumor environment, protease-untreated anti-EpCAM×anti-CD3 bispecific antigen binding polypeptide bearing two XTENs (i.e., pJB0176) is as efficacious as protease-untreated anti-EpCAM×anti-CD3 bispecific antigen binding polypeptide bearing one XTEN polymer (i.e., pJB0189). Of note, no significant body weight loss was observed in all bispecific antigen binding polypeptide treatment groups and vehicle control indicating that all treatments were well tolerated.

### Example 13: Cell Binding Assessed by Flow Cytometry

[0319] Bispecific binding of the anti-EGFR×anti-CD3 bispecific antigen binding polypeptide composition is also evaluated by flow cytometry-based assays utilizing CD3 positive human Jurkat cells and EGFR positive human cells selected from HT-29, HCT-116, NCI-H1573, NCI-H1975, FaDu, and SCC-9 or a stable CHO cell line expressing EGFR. CD3⁺ and EGFR⁺ cells are incubated with a dose range of untreated anti-EGFR×anti-CD3 bispecific antigen binding polypeptide (PJB0169, comprising 2 XTEN and 2 RS), protease-treated PJB0169, and anti-CD3 scFv and anti-EGFR scFv positive controls for 30 min at 4° C. in binding buffer containing HBSS with 2% BSA and 5 mM EDTA. After washing with binding buffer to remove unbound test material, cells are incubated with FITC-conjugated anti-His tag antibody (Abcam cat #ab1206) for 30 min at 4° C. Unbound FITC-conjugated antibody is removed by washing with binding buffer and cells resuspended in binding buffer for acquisition on a FACS Calibur flow cytometer (Becton Dickerson) or equivalent instrument. All flow cytometry data are analyzed with FlowJo software (FlowJo LLC) or equivalent.

[0320] While anti-EGFR scFv is not expected to bind to Jurkat cells, anti-CD3 scFv, untreated PJB0169 and protease-treated PJB0169 are all expected to bind to Jurkat cells as indicated by an increase in fluorescence intensity when compared to Jurkat cells incubated with FITC-conjugated anti-His tag antibody alone. Similarly, anti-EGFR scFv, protease-treated and untreated PJB0169 are all expected to bind to EGFR positive cells, while anti-CD3 scFv is not expected to bind to EGFR positive cells. It is expected that these data will reflect the bispecific binding ability of the anti-EGFR×anti-CD3 bispecific antigen binding polypeptide composition to recognize both the CD3 and EGFR antigen expressed respectively on Jurkat and the panel of EGFR expressing human cell lines. Furthermore, due to the XTEN polymer providing some interference in surface binding, the untreated anti-EGFR×anti-CD3 bispecific antigen binding polypeptide is expected to bind at a lower affinity than the protease-treated bispecific antigen binding polypeptide for both the CD3 and EGFR antigens.

### Example 14: Cell Lysis Assessed by Flow Cytometry

[0321] Cell lysis by the anti-EGFR×anti-CD3 bispecific antigen binding polypeptide composition is evaluated by flow cytometry utilizing human PBMCs and an EGFR positive cell line. EGFR positive HCT-116 target cells (or target cells selected from HT-29, NCI-H1573, NCI-H1975, FaDu, and SCC-9 or a stable CHO cell line expressing EGFR) are labeled with the fluorescent membrane dye CelIVue Maroon dye (Affymetrix/eBioscience, cat #88-0870-16) according to manufacturer's instructions. Alternatively PKH26 (Sigma, cat #MINI26 and PKH26GL) can also be used. In brief, HCT-116 cells are washed twice with PBS followed by resuspension of 2×10⁶ cells in 0.1 mL Diluent C provided with the CelIVue Maroon labeling kit. In a separate tube, 2 μL of CelIVue Maroon dye is mixed with 0.5 mL diluent C, and then 0.1 mL added to the HCT-116 cell suspension. The cell suspension and CelIVue Maroon dye are mixed and incubated for 2 min at room temperature. The labeling reaction is then quenched by the addition of 0.2 mL of fetal bovine serum (FCS). Labeled cells are washed twice with complete cell culture medium (RPMI-1640 containing 10% FCS) and the total number of viable cells determined by trypan blue exclusion. For an effector to target ratio of 10:1 in a total volume of 200 μL per well, 1×10⁵ PBMC are co-cultured with 1×10⁴ CelIVue Maroon-labeled HCT-116 cells per well in a 96-well round-bottom plate in the absence or presence of the indicated dose range concentration of protease-treated and untreated anti-EGFR×anti-CD3 bispecific antigen binding polypeptide (PJB0169, comprising 2 XTEN and 2 RS) samples. After 24 h, cells are harvested with Accutase (Innovative Cell Technologies, cat #AT104) and washed with 2% FCS/PBS. Before cell acquisition on a Guava easyCyte flow cytometer (Millipore), cells are resuspended in 100 μL 2% FCS/PBS supplemented with 2.5 micrograms/mL 7-AAD (Affymetrix/eBioscience, cat #00-6993-50) to discriminate between alive (7-AAD-negative) and dead (7-AAD-positive) cells. FACS data are analyzed with guavaSoft software (Millipore); and percentage of dead target cells is calculated by the number of 7-AAD-positive/CelIVue Maroon-positive cells divided by the total number of CelIVue Maroon-positive cells.

[0322] Dose response kill curves of percent cytotoxicity against bispecific antigen binding polypeptide concentration are analyzed by 4 parameter-logistic regression equation using GraphPad Prism; and the concentration of bispecific antigen binding polypeptide that induced half maximal percent cell cytotoxicity is thus determined.

[0323] Cytotoxicity results utilizing flow cytometry are expected to be in-line with results obtained with other cytotoxicity assays, including LDH and caspase. Exposure of HCT-116 cells to protease-cleaved and uncleaved anti-EGFR×anti-CD3 bispecific antigen binding polypeptide compositions in the absence of PBMC are expected to have no effect. Similarly, PBMC are not expected to be activated in the presence of bispecific antigen binding polypeptide without target cells. These results are expected to indicate that bispecific antigen binding polypeptide compositions need to be clustered on the surface of target cells in order to stimulate PBMC for cytotoxicity activity. In the presence of PBMC and target cells, there would be a concentration-dependent cytotoxic effect due to bispecific antigen binding polypeptide pretreated or untreated with protease. Further, results are expected to show that exposure of HCT-116 cells to untreated bispecific antigen binding polypeptide (no protease) in the presence of PBMC would show reduced cytotoxicity as compared to protease-cleaved bispecific antigen binding polypeptide composition.

### Example 15: T-Cell Activation Marker Assays of Anti-EGFR×Anti-CD3 Bispecific Antigen Binding Polypeptide Composition

[0324] To measure the anti-EGFR×anti-CD3 bispecific antigen binding polypeptide induced activation markers (CD69 and CD25), 1×10⁵ PBMC or purified CD3+ cells are co-cultured in RPMI-1640 containing 10% FCS with 1×10⁴ HCT-116 or HT-29 cells per assay well (i.e., effector to target ratio of 10:1) in the presence of anti-EGFR×anti-CD3 bispecific antigen binding polypeptide (PJB0169, comprising 2 XTEN and 2 RS) in a 96-well round-bottom plate with total final volume of 200 μL. After 20 h incubation in a 37° C., 5% CO₂ humidified incubator, cells are stained with PECy5-conjugated anti-CD4, APC-conjugated anti-CD8, PE-conjugated anti-CD25, and FITC-conjugated anti-CD69 (all antibodies from BioLegend) in FACS buffer (1% BSA/PBS) at 4° C., washed twice with FACS buffer, and then re-suspended in FACS buffer for acquisition on a Guava easyCyte flow cytometer (Millipore).

[0325] The T-cell activation marker expression trend of the three bispecific antigen binding polypeptide molecules is expected to be similar to that observed by cytotoxicity assays, including LDH and caspase. Activation of CD69 on CD8 and CD4 populations of PBMC or CD3+ cells by untreated anti-EGFR×anti-CD3 bispecific antigen binding polypeptide (pJB0169) is expected to be less active than protease-treated pJB0169 bispecific antigen binding polypeptide; and the non-cleavable anti-EGFR×anti-CD3 bispecific antigen binding polypeptide (pJB0172) is expected to be less active than the untreated pJB0169.

### Example 16: Cytometric Bead Array Analysis for Human Th1/Th2 Cytokines Using Stimulated Normal Healthy Human PBMCs and Intact and Protease-Treated Anti-EGFR×Anti-CD3 Bispecific Antigen Binding Polypeptide

[0326] As a safety assessment of the ability of intact versus cleaved anti-EGFR×anti-CD3 bispecific antigen binding polypeptide (pJB0169, comprising 2 XTEN and 2 RS) to stimulate release of T-cell related cytokines in a cell-based in vitro assay, a panel of cytokines including IL-2, IL-4, IL-6, IL-10, TNF-alpha, IFN-gamma are analyzed using the cytometric bead array (CBA) on supernatants from cultured human PBMC stimulated with protease-treated and untreated anti-EGFR×anti-CD3 bispecific antigen binding polypeptide samples. The anti-human CD3 antibody, OKT3, is used as positive control and untreated wells serve as negative control.

[0327] Briefly, OKT3 (0, 10 nM, 100 nM and 1000 nM) and protease-treated and untreated anti-EGFR×anti-CD3 bispecific antigen binding polypeptide (pJB0169 at 10 nM, 100 nM, 1000 nM and 2000 nM) are dry-coated onto a 96-well flat-bottomed plate by allowing the wells to evaporate overnight in the biosafety hood. Wells are then washed once gently with PBS and 1×10⁶ PBMC in 200 μL were added to each well. The plate is then incubated at 37° C., 5% CO₂ for 24 h, after which tissue culture supernatant is collected from each well and analyzed for cytokine released using the validated commercial CBA kit (BD CBA human Th1/Th2 cytokine kit, cat #551809) by flow cytometry following manufacturer's instructions.

[0328] OKT3, but not untreated wells, is expected to induce robust secretion of all cytokines (IL-2, IL-4, IL-6, IL-10, TNF-alpha, IFN-gamma) evaluated, thereby confirming the performance of the CBA cytokine assay. Stimulation with protease-treated anti-EGFR×anti-CD3 bispecific antigen binding polypeptide is expected to trigger significant cytokine expression, especially at concentrations higher than 100 nM for all of the cytokines tested. In contrast, baseline levels of IL-2, IL-6, IL-10, TNF-alpha and IFN-gamma are expected when the intact non-cleaved anti-EGFR×anti-CD3 bispecific antigen binding polypeptide molecule is the stimulant at a concentration range of 10 to 2000 nM. These data support that the XTEN polymer of the intact bispecific antigen binding polypeptide composition provides considerable shielding effect and hinders PBMC stimulated cytokine responses compared to the protease-treated bispecific antigen binding polypeptide in which the EGFR×anti-CD3 portion is released from the composition.

### Example 17: Cytotoxicity Assays of Anti-EGFR×Anti-CD3 Bispecific Antigen Binding Polypeptide Composition in the Presence of Purified CD3 Positive T Cells

[0329] To demonstrate that cytotoxic activity of bispecific antigen binding polypeptide molecules is mediated by CD3 positive T cells, non-cleavable anti-EGFR×anti-CD3 bispecific antigen binding polypeptide without the release segment (pJB0172, comprising 2 XTEN) and protease-treated and untreated anti-EGFR×anti-CD3 bispecific antigen binding polypeptide (pJB0169, comprising 2 XTEN and 2 RS) are evaluated in EGFR+ human cell lines (e.g. HCT-116 or HT-29) in the presence of purified human CD3 positive T cells. Purified human CD3 positive T cells are purchased from BioreclamationIV, where they are isolated by negative selection using MagCellect Human CD3+ T cell isolation kit from whole blood of healthy donors. In this experiment, purified human CD3 positive T cells are mixed with an EGFR+ cell line in a ratio of about 10:1 and all three bispecific antigen binding polypeptide molecules were tested as a 12-point, 5× serial dilution dose curve in the LDH assay as described above. The activity trend of the three bispecific antigen binding polypeptide molecules profiled with CD3+ cells is expected to be similar to the profile of the same cell line with PBMCs. Untreated pJB0169 is expected to be less active than protease-treated pJB0169; and the non-cleavable pJB0172 is expected to be less active than untreated pJB0169. Such results would demonstrate that cytotoxic activity of bispecific antigen binding polypeptide molecules is indeed mediated by CD3 positive T cells. The susceptibility of the release segment contained within the cleavable anti-EGFR×anti-CD3 bispecific antigen binding polypeptide molecule to proteases postulated to be released from the tumor cells and/or activated CD3 positive T cells in the assay mixture is likely to differ between cell lines.

### Example 18: T-Cell Activation Marker and Cytokine Release Assays of Anti-EGFR×Anti-CD3 Bispecific Antigen Binding Polypeptide Composition

[0330] To measure the anti-EGFR×anti-CD3 bispecific antigen binding polypeptide induced expression of cytokines, purified CD3+ cells are co-cultured with HCT-116 cells per assay well (i.e., effector to target ratio of about 10:1) in the presence of anti-EGFR×anti-CD3 bispecific antigen binding polypeptide (pJB0169, comprising 2 XTEN and 2 RS) in a 96-well round-bottom plate with total final volume of 200 μL. After 20 h incubation in a 37° C., 5% CO₂ humidified incubator, cell supernatant is harvested for cytokine measurements. This assay can also be performed with other target cells selected from HT-29, NCI-H1573, NCI-H1975, FaDu, and SCC-9 as well as PBMC in place of purified CD3+ cells.

[0331] Cytokine analysis of interleukin (IL)-2, IL-4, IL-6, IL-10, tumor necrosis factor (TNF)-alpha and interferon (IFN)-gamma secreted into the cell culture supernatant is quantitated using the Human Th1/Th2 Cytokine Cytometric Bead Array (CBA) kit (BD Biosciences cat #550749) following manufacturer's instruction. In the absence of bispecific antigen binding polypeptide, no cytokine secretion above background is expected from purified CD3+ cells. pJB0169 in the presence of EGFR-positive target cells and purified CD3+ cells is expected to activate T cells and secrete a pattern of T cell cytokines with a high proportion of Th1 cytokines such as IFN-gamma and TNF-alpha. Compared to intact pJB0169, lower concentrations of protease-treated pJB0169 are expected to active T cells and secrete T cell cytokines, supporting the shielding effect of the XTEN polymer in bispecific antigen binding polypeptide.

### Example 19: Anti-Tumor Properties of Anti-EGFR×Anti-CD3 Bispecific Antigen Binding Polypeptide Compositions in Early Treatment HT-29 In Vivo Model

[0332] An in vivo efficacy experiment was performed to evaluate an EGFR-CD3 bispecific antigen binding polypeptide composition based on the pJB0169 construct in immunodeficient NOD/SCID mice, characterized by the deficiency of T and B cells and impaired natural killer cells. Mice were maintained in sterile, standardized environmental conditions and the experiment was performed in accordance with US Institutional Animal Care Association for Assessment and Use Committee (IACUC Accreditation of Laboratory Animal Care (AAALAC)) guidelines. The efficacy of protease-treated and protease-untreated anti-EGFR×anti-CD3 bispecific antigen binding polypeptide (e.g. pJB0169) was evaluated using the EGFR BRAF mutant human HT-29 adenocarcinoma xenograft model. Briefly, on day 0, 6 NOD/SCID mice were subcutaneously implanted in the right flank with 3×10⁶ HT-29 cells per mouse (Cohort 1). On the same day, cohort 2 to 7 each consisting of 6 NOD/SCID mice per group were subcutaneously injected in the right flank with a mixture of 6×10⁶ human PBMC and 3×10⁶ HT-29 cells per mouse. Four hours after HT-29 or HT-29/PBMC mixture inoculation, treatments were initiated. Cohort 1 and 2 were injected intravenously with vehicle (PBS+0.05% Tween 80), cohort 3 and 4 were injected with 0.05 mg/kg of the intact anti-EGFR×anti-CD3 bispecific construct and 0.5 mg/kg of the anti-EGFR×anti-CD3 bispecific construct treated with protease to remove the XTEN from the polypeptide, respectively, cohort 5 and 6 were injected with 0.143 mg/kg and 1.43 mg/kg intact anti-EGFR×anti-CD3 bispecific construct, and cohort 7 were injected with 50 mg/kg cetuximab as the positive control. Cohorts 1 to 6 further received seven additional doses administered daily from day 1 to day 7 (total 8 doses). Cohort 7 was dosed with cetuximab twice/week for 4 weeks for a total of 8 doses.

[0333] Tumors in the mice were measured twice per week for a projected 33 days with a caliper in two perpendicular dimensions and tumor volumes were calculated by applying the (width²×length)/2 formula. Body weight, general appearance and clinical observations such as seizures, tremors, lethargy, hyper-reactivity, pilo-erection, labored/rapid breathing, coloration and ulceration of tumor and death were also closely monitored as a measure of treatment related toxicity. Percent tumor growth inhibition index (% TGI) was calculated for each of the treatment group by applying the formula: ((Mean tumor volume of Cohort 2 vehicle control−Mean tumor volume of test article treatment)/mean tumor volume of Cohort 2 vehicle control)×100. Treatment results with a % TGI≥60% is considered therapeutically active.

[0334] Results: At day 33, vehicle-treated cohort 1 mice bearing tumor cells only had an average tumor burden of 250±113 mm³. Cohort 2 mice treated with vehicle in the presence of human effector cells did not inhibit tumor progression, having an average tumor burden of 238±228 mm³, demonstrating that human effector cells alone, as such, could not elicit an anti-tumor effect. Treatment with the protease-treated anti-EGFR×anti-CD3 construct at 0.05 mg/kg and 0.5 mg/kg (cohort 3 and 4 respectively) in the presence of human effector cells exhibited clear anti-tumor regression with a % TGI of 99% for both treatment groups. Importantly, treatment with anti-EGRF×anti-CD3 bispecific antigen binding composition at 0.143 mg/kg and 1.43 mg/kg (cohort 5 and 6 respectively) in the presence of human effector cells also inhibited tumor growth in a dose-dependent manner with % TGI of 70% for the 0.143 mg/kg dose group and 96% in the 1.43 mg/kg cohort. The data suggest that at 0.143 mg/kg and 1.43 mg/kg dosages, sufficient amounts of the anti-EGFR×anti-CD3 constructs were effectively cleaved by proteases in the in vivo tumor environment into the more active, unXTENylated anti-EGFR×anti-CD3 bispecific antigen binding fragments to yield the observed efficacy. Significantly, cohort 7 treated with 50 mg/kg of cetuximab did not induce tumor regression, with a % TGI of −20%.

[0335] Conclusions: The results suggest that the anti-EGFR×anti-CD3 bispecific construct can be effectively cleaved in vivo into the active form and is efficacious in the EGFR BRAF mutant HT-29 tumor environment to inhibit tumor progression. In addition, the anti-EGFR×anti-CD3 bispecific construct was superior to the cetuximab control in anti-tumor activity under the conditions of the experiment. Of note, no significant body weight loss was observed in all test article treatment groups and vehicle.

### Example 20: Anti-Tumor Properties of Protease Activated Anti-Her2×Anti-CD3 Bispecific Antigen Binding Polypeptide Bearing One or Two XTEN in Established Ovarian Tumor Model

[0336] In the established murine ovarian tumor model, 5×10⁶ SK-OV-3 tumor cells were independently implanted, in the presence of matrigel, subcutaneously into fifty-eight NOG (NOD/Shi-scid/IL-2Rγ^{null}) mice on day 0. (The NOG mice are NOD/SCID mice bearing IL-2Rγ mutation resulting in the mice lacking T, B and NK cells, dysfunctional macrophage, dysfunctional dendritic cells and reduced complement activity.) When SK-OV-3 tumor volume reached approximately 60 mm³, six NOG mice were intravenously administered with 100 μL PBS and designated as Cohort 1. The remaining unassigned 52 mice were intravenously injected with 5×10⁶ human PBMCs/mouse. When mean tumor volume reached approximately 150 mm³, 36 of the 52 NOG mice were allocated to 6 study groups of 6 mice per group based on tumor volume. These groups were assigned as study Cohort 2 to 7. Treatment with vehicle, a protease-untreated anti-Her2×anti-CD3 bispecific antigen binding polypeptide carrying one XTEN polymer (i.e., pCW1628), an anti-Her2×anti-CD3 bispecific antigen binding polypeptide bearing two XTEN polymers (e.g. pJB0244) and a protease-treated anti-Her2×anti-CD3 bispecific antigen binding polypeptide in which the XTEN are cleaved from the construct was initiated at equimolar concentrations for each group, dosed as three intravenous doses per week for three weeks. Cohort 1 and 2 were the vehicle-treated groups, cohort 3 was the pCW1628-treated group at 0.82 mg/kg (6 nmol/kg), cohort 4 was the protease-treated anti-Her2×anti-CD3 construct (without XTEN)-treated group at 0.35 mg/kg (6 nmol/kg), and cohort 5 to 7 were the pJB0244 bispecific construct-treated group at 1 mg/kg (6 nmol/kg), 2.5 mg/kg (15 nmol/kg) and 6.0 mg/kg (36 nmol/kg) respectively.

[0337] Tumors were measured twice per week for up to 35 days with a caliper in two perpendicular dimensions and tumor volumes were calculated by applying the (width²×length)/2 formula. Body weight, general appearance and clinical observations such as seizures, tremors, lethargy, hyper-reactivity, pilo-erection, labored/rapid breathing, coloration and ulceration of tumor and death were also closely monitored as a measure of treatment related toxicity. Percent tumor growth inhibition index (% TGI) was calculated for each of the treatment group by applying the formula: ((Mean tumor volume of Cohort 2 vehicle control−Mean tumor volume of test article treatment)/mean tumor volume of Cohort 2 vehicle control)×100. Treatment group with % TGI≥60% is considered therapeutically active.

[0338] Results: At day 35, vehicle-treated cohort 1 and 2 mice did not inhibit tumor progression, having a tumor burden of 1122±243 mm³ and 844±258 mm³ demonstrating that human effector cells alone as such could not elicit an anti-tumor effect. As expected, treatment with protease-treated anti-Her2×anti-CD3 bispecific construct at 0.35 mg/kg (cohort 4) in the presence of human effector cells exhibited clear anti-tumor regression with % TGI of 100%. Treatment with pCW1628, an anti-Her2×anti-CD3 bispecific construct bearing one XTEN polymer at 0.82 mg/kg (cohort 3) in the presence of human effector cells also elicited a robust anti-tumor response yielding a % TGI of 100%. Importantly, a dose-dependent anti-tumor response was observed with treatment of, an anti-Her2×anti-CD3 bearing two XTEN polymers. pJB0244 dosed at 1 mg/kg (cohort 5) was considered therapeutically inactive with a % TGI of 51%. Increasing the dose level of pJB0244 to 2.5 mg/kg yielded a therapeutically active % TGI of 69% and to 6 mg/mL a TGI of 98%.

[0339] Conclusions: Data suggest that at 6 mg/kg (36 nmol/kg) in the in vivo SK-OV-3 tumor environment, protease-untreated anti-Her2×anti-CD3 bispecific construct bearing two XTENs (e.g., pJB0244) is as efficacious as protease-untreated anti-Her2×anti-CD3 bearing one XTEN polymer (e.g., pCW1628) at 6 nmol/kg and to protease-treated anti-Her2×anti-CD3 bispecific construct molecule (with XTEN removed) at 6 nmol/kg. Of note, no significant body weight loss was observed in all test article treatment groups as compared to Cohort 2 vehicle control indicating that all treatments were well tolerated.

### Example 21: Single- and Multi-Dose Pharmacokinetic Determination of Anti-EGFR×Anti-CD3 Bispecific Antigen Binding Polypeptide in Non-Human Primates

[0340] The pharmacokinetics (PK) and general tolerability of anti-EGFR×anti-CD3 bispecific antigen binding polypeptide bearing 2 XTEN polymers (i.e., pJB0169) following single and multiple intravenous administrations was evaluated in naïve, healthy non-human primates (NHP) (e.g., cynomolgus monkeys). Briefly, one female and one male monkey was intravenously infused with 8.5 μg/kg of the composition via the cephalic vein. Both animals were monitored for two weeks. Following no observable adverse events, animals were subjected to a multi-dose regimen initiated as one dose every three days for three weeks (total 9 doses in study). The multi-dose phase began with Day 15 and ended on Day 36. At specific time points throughout the study, blood was collected for assay of pharmacokinetics, cytokines, hematology and serum chemistries.

[0341] Animal monitoring included body weight, body temperature and cage-side observations once or twice daily during the duration of the study. Animals were monitored for general health and appearance; signs of pain and distress, fever, chills, nauseas, vomiting and skin integrity. On dosing days, animals were checked for injection site reactions before and after administration of the compositions. Hematology and serum chemistry were determined at predose and 24 hours after first single dose. Cytokines were evaluated at pre-dose and at appropriate intervals within 72 hours post first single dose and in the multi-dose phase.

[0342] The amount of pJB0169 present in plasma was quantitated on a sandwich ELISA using EGFR-biotin captured on an electrochemiluminescence streptavidin plate with sulfo-tagged anti-XTEN-antibody as detection. Pharmacokinetic parameters including Cmax, Tmax, area under the curve, half-life and exposure profile were analyzed using the WinNonLin software.

[0343] The cytokine panel included measurement of IFN-gamma, IL-1beta, TNF-alpha, IL-1beta, IL-2, IL-4, IL-6, and IL-10 using the Meso-Scale Discovery platform following manufacturer's instructions. The lower limit of detection for these cytokines are 2.0 μg/mL, 0.32 pg/mL, 0.11 μg/mL, 0.68 μg/mL, 0.04 μg/mL, 0.23 μg/mL and 0.10 μg/mL respectively. The hematology panel included measurement of white blood cells, red blood cells, hemoglobin, hematocrit, mean corpuscular hemoglobin volume, mean corpuscular hemoglobin concentration, red blood cell distribution width, platelet, mean platelet volume, % neutrophils, % lymphocytes, % monocytes, % eosinophils and % basophils. The serum chemistry panel included measurement of alanine aminotransferase, aspartate aminotransferase, total protein, albumin, alkaline phosphatase, globulin, albumin/globulin ratio, γ-glutamyltransferase, glucose, urea, creatinine, calcium, total cholesterol, triglycerides, total bilirubin, sodium, potassium, chlorine and creatine kinase.

[0344] Results: pJB0169 was well tolerated at a dose of 8.5 μg/kg. There was no loss in body weight. No chills, fever, nausea, vomiting, skin rash, test artile injection site reaction were observed. All measured cytokine levels except IL-6 were below the limits of detection. Although detectable in the single-dose and multi-dose phase, the level of IL-6 detected is considered to be background with the highest level not exceeding 51 μg/mL in male and 19 μg/mL in female animals in the range of time points evaluated. Hematology and clinical panel were within normal range. Following Day 1 administration, at 8.5 μg/kg, the average Cₘₐₓ value was 372 ng/mL, the averaged AUC₀₋₁₆₈ₕ was 15839 ng*h/mL, the averaged AUC_{0-inf} was 16342 ng*h/mL, the averaged CL value was 0.00886 mL/min/kg and the averaged T_{1/2} value was 24.2 hours. The volume of distribution (Vd) was 0.0238 L/kg. Following Day 36 administration, average Cₘₐₓ value was 410 ng/mL, the averaged AUC₀₋₁₆₈ₕ was 22985 ng*h/mL, the averaged AUC_{0-inf} was 24663 ng*h/mL, the averaged CL value was 0.00578 mL/min/kg and the averaged T_{1/2} value was 44.0 hours. The volume of distribution (Vd) was 0.0196 L/kg. The accumulative index of Cₘₐₓ and AUC₀₋₁₆₈ₕ in monkey following single or multiple IV infusion administration of pJB0169 at 8.5 μg/kg were 1.10 and 1.45. There was no significant difference in systemic exposure between Day 1 and Day 36 administration. Data also suggest no emergence of anti-drug antibodies.

### Example 22: Dose Range Finding of Anti-EGFR×Anti-CD3 Bispecific Antigen Binding Polypeptides in Non-Human Primates

[0345] The dose range finding study of the pJB0169 bispecific antigen binding polypeptide in non-human primates was carried out in healthy, naïve cynomolgus monkeys with one female and one male monkey per cohort. Briefly, one female and one male monkey was intravenously infused with pJB0169 via the cephalic vein. Both animals were monitored for two weeks. Following no observable adverse events, animals were subjected to a multi-dose regimen initiated as one dose every three days for three weeks (total 9 doses in study). The multi-dose phase began with Day 15 and ended on Day 36. At specific time points throughout the study, blood was collected for assay of pharmacokinetics, cytokines, hematology and serum chemistries. Twenty-four hours after the last dose (i.e. Day 37), animals were necropsied for histopathology evaluation. When no adverse events were observed one week after the first dose in a cohort, pJB0169 was dose escalated 2- or 3-fold in the next cohort. Dose escalation will proceed until adverse events are observed.

[0346] Animal monitoring included body weight, food consumption, body temperature and cage-side observations once or twice daily during the duration of the study. Animals were monitored for general health and appearance; signs of pain and distress; fever, chills, nauseas, vomiting and skin integrity. On dosing days, animals were checked for injection site reaction before and after administration of the test articles.

[0347] The amount of pJB0169 present in plasma will be quantitated on a sandwich ELISA using EGFR-biotin captured on an electrochemiluminescence streptavidin plate with sulfo-tagged anti-XTEN-antibody as detection. Pharmacokinetic parameters including Cmax, Tmax, area under the curve, half-life and exposure profile will be analyzed using WinNonLin software.

[0348] The cytokine panel will include measurement of IL-2, IL-4, IL-5, IL-6, IL-10, IL-13, IFN-gamma and TNF-alpha using Beckon Dickinson Cytometric Bead Array.

[0349] The hematology panel included measurement of white blood cells, red blood cells, hemoglobin, hematocrit, mean corpuscular hemoglobin volume, mean corpuscular hemoglobin concentration, red blood cell distribution width, platelet, mean platelet volume, % neutrophils, % lymphocytes, % monocytes, % eosinophils and % basophils.

[0350] The serum chemistry panel included measurement of alanine aminotransferase, aspartate aminotransferase, total protein, albumin, alkaline phosphatase, globulin, albumin/globulin ratio, y-glutamyltransferase, glucose, urea, creatinine, calcium, total cholesterol, triglycerides, total bilirubin, sodium, potassium, chlorine and creatine kinase.

[0351] Histopathology evaluation with H&E staining were performed on a panel of tissues including adrenal glands, aorta, bone, brain, epididymides, esophagus, eyes, fallopian tubes (female only), heart, kidney, large intestines, liver with gall bladder, lungs, lymph nodes, mammary glands (female only), ovaries (female only), pancreas, pituitary gland, prostate gland, salivary glands, skeletal muscles, skin, small intestines, spinal cord, spleen, stomach, testes (male only), thymus, thyroid glands, trachea, urinary bladder, uterus and injection site.

[0352] Interim results: The starting dose in this dose range finding study was Cohort 1 at 25.5 μg/kg of pJB0169. No observable adverse events such as fever, chills, skin rash, nausea, vomiting, abnormal hematology and serum chemistry were observed in the single-dose and multi-dose phase. pJB0169 was therefore dose-escalated 3-fold to 76.5 μg/kg in Cohort 2. No observable adverse events were observed in Cohort 2 and pJB0169 was dose-escalated 3-fold to 230 μg/kg in Cohort 3. Other than a reversible increase in AST, ALT and total bilirubin readings above the normal range, no other adverse events were observed and pJB0169 was next dose-escalated 2-fold to 460 μg/kg in Cohort 4. No observable adverse events were observed in Cohort 4. Further dose escalation of pJB0169 is ongoing.

[0353] There were no found dead and moribund animals during the whole study period. There were no test article-related organ weight changes in any treatment groups. There were no observed gross lesions in all the tested animals. Microscopically, the major findings were subcutaneous hemorrhage, tissue necrosis, neutrophilic infiltration, venous necrosis or thrombosis, and skin crust at the injection sites of some animals. These changes were likely attributed to the intravenous infusion procedure.

[0354] Interim conclusions: pJB0169 bispecific antigen binding polypeptide is well-tolerated in non-human primates at doses up to 460 μg/kg. No test article-related organ weight and pathologic changes were observed in all tested dose groups.

### Example 23: Determination of Isoelectric Point (pI) of Antigen Binding Fragments

[0355] To determine the isoelectric point various CD3 and EGFR variant antigen binding fragments, each was analyzed using the Protein Titration Curve Panel in the Biologics suite of Maestro (Schrödinger, Germany). The titration curve for a protein is calculated from the pKa values of titratable groups—individual ionizable residues and termini—by summing the fractional charges of each such group at intervals in the pH value. The pKa values are generated with ProPKA (Sondergaard, C. et al. Toxicol Lett. 205(2):116 (2011); Olsson, M. et. al. Proteins 79:3333 (2011)). The titration curves were plotted and the isoelectric point (pI) was determined for each curve, with the results presented in the tables, below.

TABLE 20
Isoelectric points for CD3 variants

| Antibody | Variant | Isoelectric Point (pI) |
|---|---|---|
| CD3 | 3.9 | 6.8 |
| CD3 | CD3.30 | 6.8 |
| CD3 | CD3.31 | 6.2 |
| CD3 | CD3.32 | 6.2 |
| CD3 | CD3.33 | 6.2 |

TABLE 21
Isoelectric points for EGFR variants

| Antibody | Variant | Isoelectric Point (pI) |
|---|---|---|
| EGFR | EGFR.2 | 5.0 |
| EGFR | EGFR.13 | 5.0 |
| EGFR | EGFR.18 | 5.1 |
| EGFR | EGFR.23 | 5.1 |
| EGFR | EGFR.14 | 5.0 |
| EGFR | EGFR.19 | 5.1 |
| EGFR | EGFR.24 | 5.1 |
| EGFR | EGFR.15 | 5.3 |
| EGFR | EGFR.20 | 5.5 |
| EGFR | EGFR.25 | 5.5 |
| EGFR | EGFR.16 | 5.3 |
| EGFR | EGFR.21 | 5.5 |
| EGFR | EGFR.26 | 5.5 |
| EGFR | EGFR.17 | 5.3 |
| EGFR | EGFR.22 | 5.5 |
| EGFR | EGFR.27 | 5.5 |

### Example 24: Assessment of Masking Effect of XTENs on XPATs Via In Vitro Cytotoxicity Assays of HER2-XPAT Vs HER2-PAT

[0356] The in vitro T-cell directed cytotoxicity of HER2-XPAT (XTENylated HER2/CD3 binder, prodrug) and HER2-PAT (non-XTENylated HER2/CD3 binder, drug) were compared to assess the protective/masking effect of the XTEN molecules contained in the former using a PBMC-based effector cell assay. The HER2-XPAT construct comprised from N- to C-terminus: (1) an N-terminal XTEN (AE292 SEQ ID NO: 714) with a histidine tag, (2) a release segment, (3) an anti-HER2 scFv (the Her2.2 scFv, SEQ ID NO: 1140), (4) an anti-CD3 scFv (the CD3.23 scFv, SEQ ID NO: 1141), (5) a release segment, and (6) a C-terminal XTEN (AE584, SEQ ID NO:926). The HER2-PAT comprised the same elements as HER2-XPAT, except with the N- and C-terminal XTEN molecules cleaved off by protease treatment at the release segments.

TABLE 22
Protein Components of XPATs Used Herein

| | | SEQ ID |
|---|---|---|
| Construct | Amino Acid Sequence | NO: |
| Her2.2 | DIQMTQSPSSLSASVGDRVTITCKA | 1140 |
| scFv | SQDVSIGVAWYQQKPGKAPKLLIYS | |
| | ASYRYTGVPSRFSGSGSGTDFTLTI | |
| | SSLQPEDFATYYCQQYYIYPYTFGQ | |
| | GTKVEIKGATPPETGAETESPGETT | |
| | GGSAESEPPGEGEVQLVESGGGLVQ | |
| | PGGSLRLSCAASGFTFTDYTMDWVR | |
| | QAPGKGLEWVADVNPNSGGSIYNQR | |
| | FKGRFTLSVDRSKNTLYLQMNSLRA | |
| | EDTAVYYCARNLGPSFYFDYWGQGT | |
| | LVTVSS | |
| CD323 | ELVVTQEPSLTVSPGGTVTLTCRSS | 1141 |
| scFv | NGAVTSSNYANWVQQKPGQAPRGLI | |
| | GGTNKRAPGTPARFSGSLLGGKAAL | |
| | TLSGVQPEDEAVYYCALWYPNLWVF | |
| | GGGTKLTVLGATPPETGAETESPGE | |
| | TTGGSAESEPPGEGEVQLLESGGGI | |
| | VQPGGSLKLSCAASGFTENTYAMNW | |
| | VRQAPGKGLEWVARIRSKYNNYATY | |
| | YADSVKDRFTISRDDSKNTVYLQMN | |
| | NLKTEDTAVYYCVRHENFGNSYVSW | |
| | FAHWGQGTLVTVSS | |

Underlined residues indicate linker sequences, ScFvs are oriented VL-linker-VH, Bolded residues indicate CDRs

[0357] Cytotoxicity of both molecules was verified using an in vitro cytotoxicity method which utilized the amount of ATP present in wells of lysed target cells post treatment as a proxy for measuring cell viability. HER2 expressing target cells were seeded on white, clear bottom plates at varying densities (BT474 and NUGC4-20 k cells/well, SKOV3 and RT-112-10 k cells/well, MCF7 and MDA-MB-231-7.5 k cells/well) and allowed to incubate at 37° C., 5% CO2 overnight (18-24 hours). Prior to the end of the overnight incubation, PBMCs were thawed and incubated at 37° C., 5% CO2 for 4 hours. PBMCs were isolated from screened, healthy donors by ficoll density gradient centrifugation from either whole blood or from lymphocyte-enriched buffy coat preparations obtained from BioIVT. 10×HER2-XPAT and HER2-PAT dose-response titrations were prepared using an 11 point, 3-fold titration (12th point is non-treatment) with a starting concentration of 2400 nM for HER2-XPAT and 10 nm for HER2-PAT. PBMCs were seeded in the wells at varying Effector:Target (E:T) ratios (BT474-5:1, MCF7, RT-112, MDA-MB-231 and SKOV3-10:1, NUGC4-˜8:1). 10×HER2-XPAT and AMX-818-P1(PAT) titrations were diluted 10-fold into the well for starting concentrations of 240 nM and 1 nM, respectively. The plates were incubated at 37° C., 5% CO2 for 48 hours. After the 48-hour incubation, the plates were washed 3× with 1×PBS and 100 μL of 1×PBS was added to all wells. For the ATP assay, 100 μL of CellTiter-Glo® luminescent substrate solution was added to all wells and the plates were allowed to incubate at room temperature for 1-5 minutes. The plates were then shaken on a plate shaker at 300-500 rpm for 30-60 seconds to mix the contents of the wells and read in a luminometer using an integration time of 100 ms. The intensity of signal produced correlated to the amount of viable cells present in the wells. Mean of the signal from all non-treatment wells was calculated and used to determine % Live cells from treatment wells ((Treatment Signal/Mean of Non-Treatment Signal)*100=% Live). The % Live was plotted by concentration and half maximal response (IC50) values were derived with a 4-parameter logistic regression equation using GraphPad Prism software.

[0358] The results of these studies indicated that XTENylation was capable of mitigating cytotoxicity of the XPAT molecule relative to its cleaved HER2-PAT counterpart. HER2-XPAT and HER2-PAT displayed large differentials in potency against all HER2 expressing cell lines tested, confirming that XTENylation results in reduction of cytolytic activity of HER2-XPAT (inactivated state). This can be seen in FIG. 7 and FIG. 8B. FIG. 7 shows results of a dose-response SK-OV3 cell caspase assay where cells are treated with HER2-XPAT or HER2-PAT, demonstrating that there is a large separation between both dose response curves and thus the cytotoxicity of both constructs. FIG. 8B shows similar dose response results of the same HER2-XPAT/HER2-PAT experiment against BT-474 cells, SK-OV-3 cells, and MCF-7 cells, also demonstrating a large separation between dose response curves of the two compounds in additional cell lines.

[0359] Further, the experiments indicated that the potency of the XPAT molecule without XTEN (HER2-PAT) correlated with HER2 cell expression, indicating the cell killing mechanism is specific for HER2. This can be seen in FIG. 8A and FIG. 8B. FIG. 8A shows a dose response of HER2-PAT in a range of different cell lines that have varying HER2 surface expression; the HER2-PAT molecule shows highest potency/lowest apparent EC50 against the high HER2 expressors (SK-OV-3, BT-474), intermediate potency against the intermediate expressors (MCF-7, NUGC-4, RT-112), and low potency against the low/negative expressor (MDA-MB-231). FIG. 8B shows a different presentation of the same data against select HER2^{High} (BT-474, SK-OV-3) and HER2^{med-low} (MCF-7) cell lines only alongside potency of the HER2-XPAT molecule, demonstrating that the potency of both forms (+ and − XTEN molecule) of the XPAT molecule depend on HER2 expression, as the EC50 of the XTENylated molecule was lower (indicating greater potency) against HER2High cell lines than the HER2Med-low cell line. Cytotoxicity of HER2-PAT on RT-112 and NUGC4 was observed in a dose-dependent manner, with maximal killing of −80% observed at 1 nM of HER2-PAT. HER2-PAT displayed an estimated IC50 of 127.3 pM on MCF7 cells, while the IC50 for HER2-XPAT is >26,667 pM (>200-fold difference in potency). On HER2 amplified cell lines, HER2-PAT obtained IC50 values of 4.4 pM (BT474) and 5.71 pM (SKOV3), while AMX-818(P1) obtained IC50 values of 1,364 pM (BT474) and 15,256 pM (SKOV3). This variation in potency according to HER2 surface expression leads us to conclude that HER2-PAT has cytotoxic potential on cell lines with low to high HER2 expression, and XTENylation masks (or shields) the ability of the XPAT molecule to form an immune synapse between T-cells and target cancer cells, resulting in reduction of potency of the XPAT molecule (an illustration of the proposed mechanism of action appears in FIG. 9A).

### Example 25: Assessment of Toxicity of XTENylated Anti-CD3/Anti-HER2 XPAT in Cardiomyocytes

[0360] Normal human cardiomyocytes express low levels of HER2 and as a result, rare cases of cardiac toxicity have been observed in patients treated with some HER2-targeted therapies. Accordingly, the T-cell directed cytotoxicity of XTENylated (HER2-XPAT, prodrug) and non-XTENylated (HER2-PAT, drug) PATs from Example 24 were assessed in normal human cardiomyocytes again using a PBMC effector cell assay. In the assay, normal human cardiomyocytes purchased from FujiFilm Cellular Dynamics were used. icell cardiomyocytes (Cellular Dynamics International) were revived from liquid nitrogen and plated at 20,000 cells per 96-well for 7 days and treated as per the manufacturer's instructions. Human peripheral blood lymphocytes were added onto icell cardiomyocytes at a 10:1 Effector:Target ratio with increasing 3-fold concentrations of HER2-XPAT (starting at 300 nM) or HER2-PAT (starting at 1 nM) and incubated for 48 hours at 37° C., 5% CO2. The assay was performed in RPMI and 10% heat-inactivated fetal bovine serum. Cardiomyocyte cell viability was determined via ATP quantification and was performed with the Cell Titer-Glo Luminescent Cell Viability Assay System (Promega). Cell supernatant was aspirated, and cells were washed twice with phosphate buffered saline (PBS), aspirated, and followed by addition of PBS (100 μl per well). Automated plate washing was carried out using an LS405 microplate washer dispenser (BioTek). Cell Titer-Glo reagent was added (100 n1 per well), and assay plates were incubated for 5 minutes at room temperature. Luminescence was quantified with a multi-label reader (Molecular Devices) with an luminescence detector. For analysis of cytotoxicity, % viable cells was calculated from relative luminescence units (RLU). % live=(Test well RLU/Target cell only RLU)*100. For EC50 determination, data were transformed in Microsoft Excel and analyzed with Graph Pad Prism 8.3.1 software log(agonist)vs.response-variable slope (four parameters).

[0361] Results indicated that the XTENylation was effective at protecting the cardiomyocytes from T-cell directed cytotoxicity due to the XPAT molecule. This can be seen in FIG. 10A. FIG. 10A shows a dose-response curve of both HER2-XPAT and HER2-PAT, wherein the active drug HER2-PAT demonstrates an apparent EC50 of less than ˜1 nM and the XTENylated prodrug HER2-XPAT shows no significant cytotoxicity at greater than 100 nM concentration.

### Example 26: In Vitro T Cell Activation by HER2-XPAT and its Proteolytic Metabolites Demonstrates Masking Effect of XTENs on XPATs (XTENylated Protease-Activated T Cell Engagers)

[0362] Having observed the efficacy of the HER2-CD3 platform and the efficacy of the XTEN molecule at protecting it from unregulated activity, experiments were next performed to assess: (a) dependence of T-cell activation by XPATs on HER2 engagement; and (b) efficacy of single-XTENylation (N- or C-terminal) to mitigate cytotoxic activity due to the XPAT molecule.

[0363] For (a) and (b), the activation of CD3 positive T cells by HER2-XPAT and its proteolytic metabolites was verified using an in vitro T cell activation method. Jurkat T Cells genetically engineered to express a luciferase reporter driven by a NFAT-response element were utilized to ascertain the level of T Cell activation via measurement of luciferase present in the wells post treatment. For both (a) and (b), HER2 expressing target cells were seeded on white, clear bottom plates at varying densities (BT474-20 k cells/well, SKOV3-10 k cells/well) and allowed to incubate at 37° C., 5% CO₂ overnight (18-24 hours).

[0364] To assess the dependence of the XPAT molecule on HER2 cell surface engagement for T-cell activation (a), Jurkat T cell activation assays were performed where a portion of the wells were plated with only media (e.g. without HER2-expressing cells). Prior to the end of the overnight incubation above, 7.5×HER2-XPAT and HER2-PAT dose-response titrations were prepared using a 7 point, 6-fold titration (8th point is non-treatment) with a starting concentration of 6000 nM for HER2-XPAT and 150 nm for HER2-PAT. Jurkat reporter cells were seeded in the wells at a 5:1 Effector:Target (E:T) ratio (BT474-100 k cells/well). 7.5×HER2-XPAT and HER2-XPAT(PAT) titrations were diluted 7.5-fold into the well for starting concentrations of 800 nM and 20 nM, respectively. 7.5×HER2-XPAT at 6000 nM and HER2-PAT at 150 nM were diluted 7.5-fold into wells containing only Jurkat cells (no BT474s). The plates were incubated at 37° C., 5% CO2 for 6 hours. After the 6-hour incubation, 75 μL of Bio-Glo® luminescent substrate solution was added to all wells and the plates were incubated at room temperature for 5-10 minutes. The plates were then shaken on a plate shaker at 300-500 rpm for 30 seconds to mix the contents of the wells and read in a luminometer using an integration time of 500 ms. The intensity of signal produced correlates to the amount of luciferase from lysed Jurkats present in the wells. The signal was plotted by concentration and half maximal response (EC50) values were derived with a 4-parameter logistic regression equation using GraphPad Prism software.

[0365] The results indicated that activation of the Jurkat cells depended on engagement of HER2 on the surface of target cells. This can be seen in FIG. 11. FIG. 11A shows a dose response of Jurkat cell activation/NFAT transactivation (measured in RLUs of luciferase activity) for both the drug HER2-PAT (“HER2-PAT”) and prodrug HER2-XPAT (“HER2-XPAT”) in the presence and absence of HER2-bearing BT-474 cells. FIG. 11B shows similar data comparing HER2-PAT (“HER2-PAT”) and HER2-XPAT (“HER2-XPAT”)-induced T cell activation with HER2-bearing SK-OV-3 cells. In FIG. 11A T cells show a lack of activation by both HER2-PAT (“HER2-PAT”) and HER2-XPAT (“HER2-XPAT”) in the absence of HER2-expressing cells, as shown by the failure of the non-HER2 cell containing conditions to reach meaningful levels of T cell activation at maximum concentration compared to the maximum concentration HER2-PAT (“HER2-PAT”) condition in the presence of BT-474 cells. In both FIGS. 11A and 11B, HER2-PAT (“HER2-PAT”) and HER2-XPAT (“HER2-XPAT”) continue to show the previously observed shift in dose-response activity, showing that the XTEN molecule also appears to block T cell activation. Interpolated concentration from maximal signal observed for HER2-XPAT at 800 nM (30.47 k RLUs) for HER2-PAT at 25.6 pM indicates that there is a ˜31,257-fold difference in activity between HER2-XPAT and HER2-PAT under these conditions.

[0366] As illustrated in FIG. 8C, a relatively low level of unmasking may nonetheless response in a significant increase in cytotoxic activity. For example, at 10 nM total concentration, 1% unmasked PAT (0.1 nM) and 99% masked XPAT yields maximal activity equivalent to maximal activity of 100% PAT.

[0367] To evaluate the effects of single-XTENylated intermediates on mitigation of XPAT activity, Jurkat T cell activation assays were performed in the presence of 2×N-/C-terminally XTENylated XPAT prodrug (HER2-XPAT), N-terminal only XTENylated XPAT intermediate (HER2-XPAT(1×-N)), C-terminal only XTENylated XPAT intermediate (HER2-XPAT(1×-C)), and non-XTENylated drug (HER2-PAT). Prior to the end of the overnight incubation above, 10×HER2-XPAT, HER2-XPAT(1×-N), HER2-XPAT(1×-C), and HER2-PAT titrations were prepared using an 11 point, 4-fold titration (12th point is non-treatment) with a starting concentration of 7320 nM for HER2-XPAT, HER2-XPAT(1×-N), HER2-XPAT(1×-C), and 158.3 nm for HER2-PAT. 10×HER2-XPAT, HER2-XPAT(1×-N), HER2-XPAT(1×-C), and AMX-818-P1(PAT) titrations were diluted 10-fold into the well for starting concentrations of 732 nM and 15.83 nm, respectively. Jurkat cells were seeded in the wells at a 5:1 Effector:Target (E:T) ratio (BT474-100 k cells/well, SKOV3-50 k cells/well). The plates were incubated at 37° C., 5% CO2 for 6 hours. After the 6-hour incubation, 100 μL of Bio-Glo® luminescent substrate solution was added to all wells and the plates were incubated at room temperature for 5-10 minutes. The plates were then shaken on a plate shaker at 300-500 rpm for 30 seconds to mix the contents of the wells and read in a luminometer using an integration time of 500 ms. The intensity of signal produced correlates to the amount of luciferase from lysed Jurkat cells present in the wells. The signal was plotted by concentration and half maximal response (EC50) values were derived with a 4-parameter logistic regression equation using GraphPad Prism software.

[0368] The results indicated that both N-terminal and C-terminal XTENylated intermediates provided partial mitigation of XPAT Jurkat cell activation compared to the both N- and C-terminally XTENylated XPAT prodrug. This can be seen in FIG. 12, which shows dose response curves for 2× N-/C-terminally XTENylated XPAT prodrug (HER-2XPAT, N-terminal only XTENylated XPAT intermediate (“HER2-XPAT (1×-N)”), C-terminal only XTENylated XPAT intermediate (“HER2-XPAT (1×-C)”), and non-XTENylated drug (“HER2-PAT”) in BT-474 (FIG. 12A) and SK-OV-3 (FIG. 12B) cells. In FIG. 12, both the N-terminal only and the C-terminal only (“HER2-XPAT(1×-N)” and “HER2-XPAT (1×-C)”) constructs exhibit EC50 values that are: (a) approximately equal to each other, and (b) intermediate between the fully XTENylated prodrug (“HER2-XPAT”) and the non-XTENylated drug (“HER2-PAT”). This is true when tested against both BT-474 and SK-OV-3 cells. For BT-474 cells, numerical differences in potency could be estimated by comparing the concentration associated with the maximal value obtained for HER2-XPAT to the concentration associated with the signal for the other molecule at the signal obtained with HER2-XPAT for each pair of conditions: (a) HER2-XPAT at 732 nM and HER2-XPAT(1×-N) at 2,494.9 pM—an approximately 293-fold difference, (b) HER2-XPAT at 732 nM and HER2-XPAT(1×-C) at 3,917.4 pM—an approximately 187-fold difference, and (c) HER2-XPAT at 732 nM and HER2-PAT at 33.4 pM—an approximately 21,924-fold difference. For SK-OV-3 cells, potency differences could be estimated by from the curve (a) HER2-XPAT was the least potent, (b) HER2-XPAT(1×-N) was intermediate potency, (c) HER2-XPAT(1×-C) was intermediate potency, and (d) HER2-PAT was the highest potency. Thus, molecules with only N- or C-terminal XTEN cleaved still showed attentuated Jurkat T cell activation, suggesting that cleavage of both XTEN moieties was necessary for maximal activity.

### Example 27: In Vitro Activation of PBMCs in the Presence of XTENylated and Non-XTENylated Anti-HER2/Anti-CD3 Constructs

[0369] Having observed activation of Jurkat T-cells by the HER2-XPAT/HER2-PAT constructs, an assay was constructed to directly measure whether the HER2-XPAT/HER2-PAT constructs were capable of inducing conventional phenotypes of T-cell activation in primary cells.

[0370] Accordingly, a flow-cytometry based SK-OV-3/PBMC model using the CD69 early marker of T-cell activation was constructed to evaluate the activity of these constructs in vitro. SKOV3 cells were purchased from ATCC (catalog #HTB-77) and the cells were cultured in McCoy's 5A medium (Life technologies, 16600-082) supplemented with 10% heat-inactivated fetal bovine serum (Life technologies, 10082147). Frozen human peripheral blood mononuclear cells (PBMCs) were purchased from BioIVT. Four hours prior to performing the cytotoxicity assay, frozen PBMCs were thawed and cultured in a T75 tissue-culture flask in RPMI (Life technologies, 72400-047) supplemented with 10% FBS; SKOV3 cells were detached by Trypsin (Life technologies, 25200114), and 40,000 cells were plated in each well of a 48-well flat bottom tissue culture plate. After the 4 h incubation, 200,000 PBMCs were added to the SKOV3 cells (an effector-to-target cell ratio of 5:1), followed by addition of increasing concentrations of HER2-PAT and HER2-XPAT as indicated in the table below. The cells were co-cultured for 72 h, followed by assessment of surface CD69 expression on CD3-gated cells by flow cytometry. For cell surface receptor staining, the cells were first blocked with anti-human Fc receptor blocking solution (Biolegend, 422302) for 10 mins at 4C, followed by a 1 hour incubation at 4C in the presence of AF488-labled anti-CD3 (Biolegend, 317310) and APC/Fire750-labeled anti-CD69 antibodies (Biolegend, 310945). Prior to sample acquisition, 7-AAD (Life technologies, 00-6993-50) was added to exclude dead cells. Data were analyzed by Flowjo software and graphed in Prism.

[0371] Alternatively, into Each Well of a 96-Well Tissue Culture Plate, SKOV3 Cells were Co-Cultured with Human PBMCs at an Effector to Target Ratio of 10:1. 10 nM Concentration of HER2 PAT or 600 nM of HER2 XPAT, Followed by 4-Fold Serial Dilutions, were Added to the Co-Culture. after 48 h of Incubation, the Plate was Centrifuged at 1200 Rpm for 5 Minutes and Supernatants Collected and Stored at −80C Until Use. The Cytokines were Measured According to Biolegend's Protocol (Th1 LegendPlex 5-Plex Kit Biolegend 740723). Data were Acquired by Flow Cytometry (Beckman Coulter).

[0372] The results indicated that the HER2-XPAT and HER2-PAT constructs were able to induce conventional markers of T-cell activation on the PBMCs in the presence of HER2+ cells (SK-OV-3 cells), and that the HER2-XPAT and HER2-PAT constructs exhibited the same difference in potencies observed in the other model systems. This can be seen in FIGS. 9B-9C, which respectively display dose-response curves of % CD69+ (“activated”) T cells versus XPAT/PAT agent concentration (FIG. 9B) and PD-1+ T cells versus XPAT/PAT agent concentration (FIG. 9C) as assessed by flow cytometry. As illustrated in FIGS. 9B-9C, both HER2-PAT and HER2-XPAT constructs were capable of inducing high levels of T-cell activation (˜80% activation at saturating concentrations). In FIG. 9B, the HER2-PAT construct exhibited a dramatically lower EC50 (3.19 pM) than did the HER2-XPAT construct (3634 pM), indicating that the N-/C-terminal XTEN molecules on the HER2-XPAT construct effectively reduced activation of T-cells when present.

[0373] As illustrated in FIGS. 9D-9F, HER2 XPAT shifts the dose response for cytokine secretion, e.g., TNF-alpha (FIG. 9D), IL-2 (FIG. 9E), and IL-6 (FIG. 9F), by at least 3000-fold vs HER2-PAT.

### Example 28: Anti-Tumor Efficacy and Intratumoral T Cell Activation in BT-474 Xenograft Model

[0374] After observing the effect of the HER2-CD3 XTENylated XPAT (HER2-XPAT) in in vitro models, a BT-474 xenograft/human PBMC model was established to assess the ability of the molecule to induce tumor regression in an in vivo setting.

[0375] Mouse Model

[0376] BT-474 cells (ATCC cat # HTB-20) were grown as monolayer at 37° C. in a humidified atmosphere (5% CO₂, 95% air). The culture medium was DMEM containing 2 mM L-glutamine (ref. L0104-500, Lonza, Belgium) supplemented with 10% fetal bovine serum (ref. P30-3306, Pan Biotech). The cells are adherent to plastic flasks. For experimental use, tumor cells were detached from the culture flask by a 5-minute treatment with trypsin-versene (ref. X0930, Dutscher), in Hanks' medium without calcium or magnesium (ref. L0611-500, Dutscher) and neutralized by addition of complete culture medium. The cells were counted in a hemocytometer and their viability was assessed by 0.25% trypan blue exclusion assay.

[0377] Peripheral blood mononuclear cells (PBMCs) were collected as buffy coat samples from healthy donors. PBMCs were purified from buffy coat using gradient centrifugation according to the Ficoll-Paque® plus procedure (Ref 07907, StemCell Technologies, Meylan, France) within 24 h of whole blood collection. The viability of PBMCs were assessed by 0.25% trypan blue exclusion assay before in-vivo injection. Only PBMC preparations with viability of ≥90% were acceptable for use in the study.

[0378] To establish the xenograft mice, tumors were induced by subcutaneous injection of 2×107 BT-474 cells in 200 μL of RPMI 1640 without phenol red containing 50% (v/v) matrigel into the right flank of female NOG (NOD. Cg-Prkdc^{scid}II2rg^{tm1Sug}/JicTac) mice 6-7 weeks old (Taconic, USA). The day of tumor cell implantation was considered as day 0 (DO). BT-474 tumor cell implantation was performed 24 hours after a whole-body irradiation with a gamma-source (1.44 Gy, 60Co, BioMep, France).

[0379] To establish human PBMCs in the xenograft mice, PBMCs were injected on D23, when mean tumor volumes reached 100-200 mm³. A subset of tumor-bearing mice were not humanized and were injected with 200 μL RPMI 1640 without phenol red as a control (“non-humanized mice”). PBMC bearing mice received one single intravenous (IV) injection of 1×10⁷ PBMCs in 200 μL RPMI 1640 without phenol red (“humanized mice”). Animals were randomized on D26, 3 days after PBMC inoculation by mean tumor volume. Non-humanized mice were randomized according to their tumor volume. Humanized mice were randomized according to tumor volume and PBMC donor into treatment groups. Intravenous treatments with vehicle (i.e. Amunix diluent) and test articles were initiated on day of randomization (i.e. Day 13).

[0380] Agent Administration/Handling/Measurement

[0381] Experimental agents (vehicle, HER2-XPAT, HER2-PAT, or HER2-XTEN [an uncleavable variant of HER2-XPAT]) were administered via intravenous injection (IV) into the caudal vein of the treated mice. The administration volume was 10 mL/kg (IV) adjusted to the most recent individual body weight. Treatment started on D26. Agents were administered according to the following dosing schedule.

TABLE 23
Dosing Schedule for Agents in Humanized BT-474 Xenograft Mice

| | No. | PBMC | | Dose | Dose | | Treatment |
|---|---|---|---|---|---|---|---|
| Group | Animals | (IV) | Treatment | (nmol/kg/inj) | (mg/kg/inj) | Route | Schedule |
| 1 | 8 | No | Amunix | — | — | IV | 3 times a |
| | | | diluent | | | | week for 3 |
| | | | (vehicle) | | | | weeks |
| 2 | 8 | Yes | Amunix | — | — | IV | |
| | | | diluent | | | | |
| | | | (vehicle) | | | | |
| 3 | 8 | Yes | HER2-PAT | 6 | 0.35 | IV | |
| | | | drug | | | | |
| 4 | 5 | Yes | HER2-PAT | 15 | 0.9 | IV | |
| 5 | 10 | Yes | Her2- | 6 | 0.9 | IV | |
| | | | XPAT-2X | | | | |
| | | | (HER2-XPAT | | | | |
| | | | (XTEN-576) | | | | |
| | | | prodrug | | | | |
| 6 | 5 | Yes | Her2-XPAT | 15 | 2.1 | IV | |
| | | | (XTEN-576) | | | | |
| | | | prodrug | | | | |
| 7 | 10 | Yes | Her2-XPAT | 6 | 1.0 | IV | |
| | | | (XTEN-864) | | | | |
| | | | prodrug | | | | |
| 8 | 8 | Yes | Her2-XTEN | 6 | 1.0 | IV | |
| | | | (XTEN-864) | | | | |
| | | | prodrug | | | | |
| | | | uncleavable | | | | |
| | | | variant | | | | |
| | | | HER2-PAT | | | | |

[0382] Blood samples were collected periodically throughout the study for treatment groups. Blood was collected by jugular vein from 3 mice (1 mouse per donor) into tubes with anticoagulant (K2EDTA) according to standard procedures before the ninth (9th) treatment (47 hours after the eighth (8th) treatment). Samples were centrifuged to obtain plasma and plasma samples were stored at −80° C. until analysis.

[0383] Tumor samples were collected in some cases post treatment. For tumor collection, a central piece of the tumor was cut and fixed in neutral buffered formalin and embedded in paraffin. The remaining part of the tumor was processed and used for flow cytometry analysis. Tumors excised for flow cytometry analysis were dissected into smaller fragments using scalpels, further dissociated into single cell suspensions in a non-enzymatic cell dissociation buffer, incubated at 37° C. for 30 minutes and mechanically separated through a 70 μm cell strainer. Viable cells were then enriched using ficoll-based gradient centrifugation.

[0384] Viable cells were processed for flow cytometry analysis by surface staining after minimizing non-specific binding with an FcR blocking reagent (viability dye was also used to allow dead cell exclusion). Fluorescently labeled surface target antibodies were added, according to the procedure described by the supplier for each antibody. The mixture was incubated for 20 minutes at room temperature protected from light, washed and then fixed with 200 μL 1% formaldehyde in PBS containing PKH26 beads. All samples were stored at +4° C. and protected from light until acquisition on cytometer. For identification of positive and negative populations, the fluorescence minus one (“FMO”) principle was used to account for background antibody fluorescence. FMO controls were used for controls, for each organ, using mice from Group 0 (residual mice). Compensation was performed using compensation beads and/or single stained cells. For analysis of viability, CD4, CD8, CD25 markers, CD45 markers, and CD3 markers, Viobility 405/452 Fixable Dye (Miltenyi Biotec), PE anti-human CD4 (BD Biosciences), PE-Vio615 anti-human CD8 (Miltenyi Biotec), PE-Vio770 anti-human CD25 (Miltenyi Biotec), FITC anti-human CD45 (BD Biosciences), and APC anti-human CD3 (BD Biosciences) were used. For analysis of leukocytes, the hCD45 marker was used. For analysis of T-cells, gating on hCDR45 followed by hCD3 was used. For analysis of CD4+ or CD8+ cells, gating on hCD45 followed by hCD3, followed by hCD8 vs hCD4 was used. Activated CD8+ or CD4+ cells were assessed by gating on CD4 or CD8 followed by CD25 analysis.

[0385] Tumor growth was monitored throughout the study. Tumor was measured twice per week after randomization in two dimensions using a caliper (Brand: Fowler Sylvac, Model: 699371). Tumor volume was calculated and expressed in mm3 using the formula: V=(L×W×W)/2, where V is tumor volume, L is tumor length (the longest tumor dimension) and W is tumor width (the longest tumor dimension perpendicular to L). Dosing as well as tumor and body weight measurements were conducted in a Laminar Flow Cabinet. The parameters of tumor volume and tumor growth inhibition were used to evaluate the efficacy of treatment. Additionally, a comparison of tumor volume on the last day of the study with at least 80% of animals remaining was performed.

### Results

[0386] On the 25th day of treatment, mean tumors volumes were similar in the non-humanized and humanized vehicle treated Groups 1 and 2, indicating that humanization alone did not affect the tumor volume. Groups treated with 6 nmol/kg HER2-PAT (Group 3) and 6 nmol/kg Her2-XPAT-XTEN-576 and -XTEN-864 (Group 5 and 7) had significantly lower tumor volumes on treatment day 25 than vehicle-treated Group 2 (see FIGS. 13A and B), indicating that both the drug and prodrugs were effective at reducing tumor burden in mice. In comparison, treatment with the non-cleavable Her2-XTEN did not significantly lower the tumor volume compared to the control Group 2, indicating that the anti-tumor effect of the Her2-XPAT construct was dependent on proteolytic cleavage and release of the XTEN mask (see FIG. 13B). Additionally, both HER2-XPAT and HER2-PAT constructs appeared to have similar efficacy at equimolar doses, indicating that the addition of the cleavable XTEN molecules does not affect efficacy of the drug.

[0387] HER2-PAT Further, flow cytometry analysis of tumor infiltrating lymphocytes isolated from tumors of the animals indicated that HER2-PAT and Her2-XPAT were both effective at activating tumor-infiltrating human CD4+ and CD8+ T-cells. This can be seen in FIG. 14, which presents scatter plots of % hCD25+/CD4+ (activated CD4+ T-cells, FIG. 14A), %hCD25+/CD8+ (activated CD8+ T-cells, FIG. 14B), % hCD69+/CD4+ (activated CD4+ T-cells, FIG. 14C), and % hCD69+/CD8+ (activated CD8+ T-cells, FIG. 14D) in tumors isolated from vehicle, HER2-PAT, and HER2-XPAT treated xenograft mice. In FIGS. 14A-14D, both HER2-PAT treatment and HER2-XPAT treatment show comparable activation of CD4+ and CD8+ T-cells relative to vehicle control, with CD4+ cells being elevated at the p<0.05 confidence level, CD25+/CD8+ cells being elevated at the p<0.001 confidence level, and CD69+/CD8+ cells being elevated at the p<0.05 confidence level.

[0388] As illustrated in FIGS. 14E-14H, T cell activation is minimal in the periphery (remote from the tumor cells). No appreciable level of activation of the blood T cells was observed after treatment with XTENylated HER2-CD3 molecule (“HER2-XPAT”) or treatment with non-XTENylated HER2-CD3 molecule (“HER2-PAT”) or vehicle.

### Example 29:Anti-Tumor Efficacy Using Altered Dosing Schedule of HER2-XPAT

[0389] After observing efficacy in xenograft mice using the dosing schedule in Example 27, further dosing parameters were assessed to determine if less frequent dosing than 3×/week could be utilized. Particularly, a 3×/week dosing at 2.1 mg/kg for HER2-XPAT was investigated, using the same mouse establishment and injection protocol described in Example 27. Tumor cells were removed and the amount of CD3+ T cells were assessed per 100 mg tumor. The results are illustrated in FIG. 14I.

[0390] The results indicated that 3×/week dosing could also be sufficient to cause tumor burden regression. This can be seen in FIG. 14J, which presents a plot of tumor volume versus days post-treatment for vehicle+PBMC or HER2-XPAT dosing. In FIG. 14J, mice treated with HER2-XPAT show significantly decreased tumor burden at the endpoint versus day 0 of the same condition and the endpoint for vehicle+PBMC dosing.

### Example 30: HER2-XPAT has Significantly Increased Therapeutic Index Vs. HER2-PAT in Cynomologus Monkeys

[0391] Having established that XTENylation of the HER2 XPAT construct enhanced therapeutic index in in vitro but could induce comparable efficacy as HER2 PAT in murine tumor models in vivo settings, the XTENylated prodrug molecule was next evaluated in an cynomologus monkey (NHP) model to determine its safety profile in animals closer to the intended human population.

[0392] Cynomolgus monkeys were received from Charles River Laboratories, Houston, Tex., Covance Research Products, Alice, Tex., and Worldwide Primates, Miami, Fla. The animals were between 2.5 and 3.2 years old and weighed between 2.4 and 2.7 kg at the initiation of dosing. For experimental agents, the IV route of exposure was selected because it was the intended route of human exposure.

[0393] Single-dose tolerance studies were performed with 2.5 mg/kg, 7.5 mg/kg, and 15 mg/kg HER2-XPAT (AC2038, which has altered C-terminal XTEN molecule AE868 instead of the AE584 described in Example 24) and 21 mg/kg, 42 mg/kg, and 50 mg/kg of the HER2-XPAT variant with a shorter C-terminal XTEN molecule (AE584) described in Example 24 (AC2275) to assess toxicity of XTENylated HER2 constructs. Continuous infusion tolerance studies were performed with 1 mg/kg and 0.3 mg/kg HER2-PAT to assess toxicity of non-XTENylated HER2 constructs. These parameters are summarized in FIG. 15A.

[0394] For the HER2-XPAT 2038 and short HER2-XPAT 2275 variant, all doses below 50 mg/kg were tolerated, even after multiple days (see FIG. 15B, which shows serum concentrations of the HER2-XPAT molecule over time in the animals after the different doses). In contrast, both 1 mg/kg and 0.3 mg/kg HER2-PAT administered by continuous infusion were not tolerated and resulted in lethality and euthanasia of the animals (see FIG. 15B, which shows the serum concentrations of the HER2-PAT molecule pre-death). Based on the serum concentrations measured, the data indicates HER2-XPAT Provides >1000-fold higher tolerated Cmax vs. lethal Cmax for HER2-PAT, indicating that the XTENylation appears to improve therapeutic index in NHP animals.

### Example 31:Activity of HER2-PAT and HER2-XPAT on T-Cell Populations in Cynomolgus Monkeys

[0395] Having determined approximate maximum tolerated doses for the molecules in cynomolgus monkeys, we further analyzed the dosed animals to assess other pharmacodynamic effects of the constructs in the animals treated in Example 30. Particularly, the effect of both molecules on the size of particular subpopulations of T-cells was assessed. Blood samples were collected at 6 and 24 hours on day 1 after dosing and at 24 hours on day 4. The blood samples were manually checked (i.e., stick check) for clots and transferred at room temperature on the day of collection to the appropriate laboratory. Samples were kept at ambient temperature until analysis.

[0396] The cellular antigens and cell populations identified in the following table were quantified using flow-cytometry using specific antibodies against the marker antigens to assess effects on various T-cell populations. Below are the antibody combinations used and the cell populations identified.

TABLE 25
Flow-cytometry Marker Combinations for Immune Cell Analysis in Treated Monkeys

| Antigen Marker | Cell Population Identified | Parameters reported |
|---|---|---|
| CD45+/CD3+/CD16− | T-lymphocytes^{a} | % parent |
| CD45+/CD16−/CD8+/CD4− | T-cytotoxic lymphocytes^{a} | % grandparent |
| CD45+/CD16−/CD8+/CD4−/CD69+ | CD69+ T-cytotoxic lymphocytes^{b} | % parent |
| CD45+/CD16−/CD8+/CD4−/CD25+ | CD25+ T-cytotoxic lymphocytes^{c} | % parent |
| CD45+/CD16−/CD8−/CD4+ | T-helper lymphocytes^{a} | % grandparent |
| CD45+/CD16−/CD8−/CD4+/CD69+ | CD69+ T-helper lymphocytes^{b} | % parent |
| CD45+/CD16−/CD8−/CD4+/CD25+ | CD25+ T-helper lymphocytes^{c} | % parent |
| CD45+/CD3−/CD16+ | Natural Killer cells³ | % parent |

^{a}Absolute counts and absolute count percent of baseline were calculated and reported.
^{b}Mean Fluorescence Intensity (MFI) of CD69-BV421 gated positive were reported.
^{c}MFI of CD25-APC gated positive was reported.

[0397] The results indicated that administration of HER2-XPAT 2038 and HER2-XPAT 2275 resulted in effects on systemic lymphocytes and systemic activated lymphocyte subpopulations assessed from blood samples. This can be seen in FIG. 16, which shows effects of agent administration on total blood lymphocytes (A) and effects of AC2275 on particular populations of activated lymphocytes (B). With respect to absolute systemic lymphocyte populations, while HER2-PAT caused apparent lymphocyte margination at all doses (see decreases in lymphocyte populations), HER2-XPAT 2038 only showed margination at the 7.5 mg/kg dose and higher, and HER2-XPAT 2275 showed margination at the 21.1 mg/kg dose (see FIG. 16A). Additionally, with respect to HER2-XPAT 2275, populations of activated CD4+ and CD8+ T-cells expressing CD69 or CD25 markers of activation were largely within pre-dose ranges (see FIG. 16B). The bottom panel of FIG. 16B further illustrates the difference between the effects of XTENylated HER2-XPAT and non-XTENylated HER2-PAT constructs on peripheral CD25+CD4+ and CD25+ CD8+ populations. For example, the exemplary non-XTENylated HER2-PAT constructs caused peripheral T cell activation at a dose of about 0.2 mg/kg or less, whereas the exemplary XTENylated HER2-XPAT did not cause peripheral T cell activation at a dose of about 50 mg/kg or less.

[0398] Further analysis was conducted to look at effect of the agents on additional subpopulations of T-cells. The results indicated that while both administration of HER2-PAT and HER2-XPAT resulted in transient decreases in T helper and T cytotoxic lymphocytes due to apparent margination, HER2-XPAT failed to induce increases in CD69 expression on T cytotoxic and T helper lymphocytes at doses as high as 50 mg/kg.

### Example 32: Effect of HER2-PAT and HER2-XPAT on Systemic Cytokine Release in Cynomolgus Monkeys

[0399] HER2-PAT and HER2-XPAT (AC2275) were further investigated for their ability to induce deleterious systemic cytokine release in Cynomolgus monkeys. Monkeys prepared as in the previous two examples were injected with escalating intravenous doses of HER2-PAT or HER2-XPAT and plasma concentrations of IL-6, TNFalpha, and IFNgamma were measured by Luminex assay.

[0400] All reagents were prepared at room temperature (RT) as stated in the Luminex Performance Assay NHP XL Cytokine premixed kit guidelines. Plasma samples were diluted 2-fold in Calibrator Diluent-RD6-65. Standard Cocktails 1 and 2 were reconstituted with Calibrator Diluent RD6-65 and allowed to sit for 15 minutes at RT. After mixing 1:1, the cocktail was diluted 3-fold in order to generate an 8-point standard curve in polypropylene tubes. 50 μl of standard or sample was then plated in duplicate on the kit-provided Greiner 96 well plate. 50 μl of standard or sample was then plated in duplicate on the kit-provided Greiner 96 well plate. After reconstituting the NHP XL Cytokine Panel Microparticle Cocktail in the mixing bottle provided, 50 μl was added to the top of each well and the plate was left to incubate for 2 hours at RT shaking at 800 rpm. Washing was then performed manually using a magnet provided by R&D systems. After preparing a 1× Wash Buffer solution, 100 μl of wash buffer was added to each well and left to sit for exactly 1 minute. The liquid was removed and washing was performed another two times. After reconstituting the NHP XL Panel Biotin-Antibody Cocktail with assay diluent RD2-1 for 20 min, a 10× dilution was performed of the reconstituted NHP XL panel biotin-antibody cocktail in assay diluent RD2-1, and 50 μl was plated in each well and left to incubate at 1 hour at RT shaking at 800 rpm. After repeating the wash step, 50 μl of diluted Streptavidin-PE was added to each well and left to incubate for 20 minutes at RT on the shaker at 800 rpm. After repeating the wash step for a third time, 100 μl of wash buffer was added to each well and the plate was left to incubate for 2 minutes at RT on the shaker at 800 rpm. The plate was then immediately read using the MAGPIX analyzer.

[0401] Maximal values of cytokines measured between 6-24 hours at each evaluated dose of HER2-PAT or Her2-XPAT are presented in FIG. 17. FIG. 17 shows concentrations of IL-6 (A), TNFalpha (B), or IFNgamma (C) in pg/ml for increasing dose series of HER2-PAT or HER2-XPAT. While HER2-PAT induced cytokine release of all three cytokines at all tested concentrations, concentrations of all cytokines induced by HER2-XPAT were all near baseline, indicating that the XTEN molecules in the HER2-XPAT mitigated deleterious systemic cytokine release in the context of the prodrug.

LENGTHY TABLES
The patent application contains a lengthy table section. A copy of the table is available in electronic form from the USPTO web site (https://seqdata.uspto.gov/?pageRequest=docDetail&DocID=US20210054077A1). An electronic copy of the table will also be available from the USPTO upon request and payment of the fee set forth in 37 CFR 1.19(b)(3).

The application's sequence listing, which the Patent Office published only in electronic form, follows.

SEQUENCE LISTING (1167 sequences)

SEQ ID NO: 1 - protein, 14 aa, Artificial Sequence
  Description of Artificial Sequence: Synthetic peptide
RSSNGAVTSSNYAN

SEQ ID NO: 2 - protein, 14 aa, Artificial Sequence
  Description of Artificial Sequence: Synthetic peptide
RSSNGEVTTSNYAN

SEQ ID NO: 3 - protein, 14 aa, Artificial Sequence
  Description of Artificial Sequence: Synthetic peptide
RSSTGAVTTSNYAN

SEQ ID NO: 4 - protein, 7 aa, Artificial Sequence
  Description of Artificial Sequence: Synthetic peptide
GTNKRAP

SEQ ID NO: 5 - protein, 7 aa, Artificial Sequence
  Description of Artificial Sequence: Synthetic peptide
GTIKRAP

SEQ ID NO: 6 - protein, 10 aa, Artificial Sequence
  Description of Artificial Sequence: Synthetic peptide
ALWYPNLWVF

SEQ ID NO: 7 - protein, 10 aa, Artificial Sequence
  Description of Artificial Sequence: Synthetic peptide
ALWYSNLWVF

SEQ ID NO: 8 - protein, 10 aa, Artificial Sequence
  Description of Artificial Sequence: Synthetic peptide
GFTFNTYAMN

SEQ ID NO: 9 - protein, 19 aa, Artificial Sequence
  Description of Artificial Sequence: Synthetic peptide
RIRSKYNNYATYYADSVKD

SEQ ID NO: 10 - protein, 14 aa, Artificial Sequence
  Description of Artificial Sequence: Synthetic peptide
HENFGNSYVSWFAH

SEQ ID NO: 11 - protein, 14 aa, Artificial Sequence
  Description of Artificial Sequence: Synthetic peptide
HGNFGNSYVSWFAY

SEQ ID NO: 12 - protein, 22 aa, Artificial Sequence
  Description of Artificial Sequence: Synthetic peptide
ELVVTQEPSLTVSPGGTVTLTC

SEQ ID NO: 13 - protein, 15 aa, Artificial Sequence
  Description of Artificial Sequence: Synthetic peptide
WVQQKPGQAPRGLIG

SEQ ID NO: 14 - protein, 32 aa, Artificial Sequence
  Description of Artificial Sequence: Synthetic polypeptide
GTPARFSGSLLGGKAALTLSGVQPEDEAVYYC

SEQ ID NO: 15 - protein, 32 aa, Artificial Sequence
  Description of Artificial Sequence: Synthetic polypeptide
GTPARFSGSSLGGKAALTLSGVQPEDEAVYYC

SEQ ID NO: 16 - protein, 32 aa, Artificial Sequence
  Description of Artificial Sequence: Synthetic polypeptide
GTPARFSGSLLGGSAALTLSGVQPEDEAVYYC

SEQ ID NO: 17 - protein, 32 aa, Artificial Sequence
  Description of Artificial Sequence: Synthetic polypeptide
GTPARFSGSSLGGSAALTLSGVQPEDEAVYYC

SEQ ID NO: 18 - protein, 32 aa, Artificial Sequence
  Description of Artificial Sequence: Synthetic polypeptide
GTPARFSGSLLGGKAALTLSGVQPEDEAEYYC

SEQ ID NO: 19 - protein, 9 aa, Artificial Sequence
  Description of Artificial Sequence: Synthetic peptide
GGGTKLTVL

SEQ ID NO: 20 - protein, 25 aa, Artificial Sequence
  Description of Artificial Sequence: Synthetic peptide
EVQLLESGGGIVQPGGSLKLSCAAS

SEQ ID NO: 21 - protein, 25 aa, Artificial Sequence
  Description of Artificial Sequence: Synthetic peptide
EVQLQESGGGIVQPGGSLKLSCAAS

SEQ ID NO: 22 - protein, 25 aa, Artificial Sequence
  Description of Artificial Sequence: Synthetic peptide
EVQLLESGGGLVQPGGSLKLSCAAS

SEQ ID NO: 23 - protein, 14 aa, Artificial Sequence
  Description of Artificial Sequence: Synthetic peptide
WVRQAPGKGLEWVA

SEQ ID NO: 24 - protein, 32 aa, Artificial Sequence
  Description of Artificial Sequence: Synthetic polypeptide
RFTISRDDSKNTVYLQMNNLKTEDTAVYYCVR

SEQ ID NO: 25 - protein, 32 aa, Artificial Sequence
  Description of Artificial Sequence: Synthetic polypeptide
RFTISRDDSKNTAYLQMNNLKTEDTAVYYCVR

SEQ ID NO: 26 - protein, 11 aa, Artificial Sequence
  Description of Artificial Sequence: Synthetic peptide
WGQGTLVTVSS

SEQ ID NO: 27 - protein, 109 aa, Artificial Sequence
  Description of Artificial Sequence: Synthetic polypeptide
ELVVTQEPSLTVSPGGTVTLTCRSSNGAVTSSNYANWVQQKPGQAPRGLIGGTNKRAPGTPARFSGSLLGGKAALTLSGVQPEDEAVYYCALWYPNLWVFGGGTKLTVL

SEQ ID NO: 28 - protein, 125 aa, Artificial Sequence
  Description of Artificial Sequence: Synthetic polypeptide
EVQLLESGGGIVQPGGSLKLSCAASGFTFNTYAMNWVRQAPGKGLEWVARIRSKYNNYATYYADSVKDRFTISRDDSKNTVYLQMNNLKTEDTAVYYCVRHENFGNSYVSWFAHWGQGTLVTVSS

SEQ ID NO: 29 - protein, 109 aa, Artificial Sequence
  Description of Artificial Sequence: Synthetic polypeptide
ELVVTQEPSLTVSPGGTVTLTCRSSNGEVTTSNYANWVQQKPGQAPRGLIGGTIKRAPGTPARFSGSLLGGKAALTLSGVQPEDEAVYYCALWYPNLWVFGGGTKLTVL

SEQ ID NO: 30 - protein, 109 aa, Artificial Sequence
  Description of Artificial Sequence: Synthetic polypeptide
ELVVTQEPSLTVSPGGTVTLTCRSSNGAVTSSNYANWVQQKPGQAPRGLIGGTNKRAPGTPARFSGSSLGGKAALTLSGVQPEDEAVYYCALWYPNLWVFGGGTKLTVL

SEQ ID NO: 31 - protein, 125 aa, Artificial Sequence
  Description of Artificial Sequence: Synthetic polypeptide
EVQLQESGGGIVQPGGSLKLSCAASGFTFNTYAMNWVRQAPGKGLEWVARIRSKYNNYATYYADSVKDRFTISRDDSKNTVYLQMNNLKTEDTAVYYCVRHENFGNSYVSWFAHWGQGTLVTVSS

SEQ ID NO: 32 - protein, 109 aa, Artificial Sequence
  Description of Artificial Sequence: Synthetic polypeptide
ELVVTQEPSLTVSPGGTVTLTCRSSNGAVTSSNYANWVQQKPGQAPRGLIGGTNKRAPGTPARFSGSLLGGSAALTLSGVQPEDEAVYYCALWYPNLWVFGGGTKLTVL

SEQ ID NO: 33 - protein, 109 aa, Artificial Sequence
  Description of Artificial Sequence: Synthetic polypeptide
ELVVTQEPSLTVSPGGTVTLTCRSSNGAVTSSNYANWVQQKPGQAPRGLIGGTNKRAPGTPARFSGSSLGGSAALTLSGVQPEDEAVYYCALWYPNLWVFGGGTKLTVL

SEQ ID NO: 34 - protein, 109 aa, Artificial Sequence
  Description of Artificial Sequence: Synthetic polypeptide
ELVVTQEPSLTVSPGGTVTLTCRSSTGAVTTSNYANWVQQKPGQAPRGLIGGTNKRAPGTPARFSGSLLGGKAALTLSGVQPEDEAEYYCALWYSNLWVFGGGTKLTVL

SEQ ID NO: 35 - protein, 125 aa, Artificial Sequence
  Description of Artificial Sequence: Synthetic polypeptide
EVQLLESGGGLVQPGGSLKLSCAASGFTFNTYAMNWVRQAPGKGLEWVARIRSKYNNYATYYADSVKDRFTISRDDSKNTAYLQMNNLKTEDTAVYYCVRHGNFGNSYVSWFAYWGQGTLVTVSS

SEQ ID NO: 36 - protein, 264 aa, Artificial Sequence
  Description of Artificial Sequence: Synthetic polypeptide
ELVVTQEPSLTVSPGGTVTLTCRSSNGAVTSSNYANWVQQKPGQAPRGLIGGTNKRAPGTPARFSGSLLGGKAALTLSGVQPEDEAVYYCALWYPNLWVFGGGTKLTVLGATPPETGAETESPGETTGGSAESEPPGEGEVQLLESGGGIVQPGGSLKLSCAASGFTFNTYAMNWVRQAPGKGLEWVARIRSKYNNYATYYADSVKDRFTISRDDSKNTVYLQMNNLKTEDTAVYYCVRHENFGNSYVSWFAHWGQGTLVTVSS

SEQ ID NO: 37 - protein, 264 aa, Artificial Sequence
  Description of Artificial Sequence: Synthetic polypeptide
ELVVTQEPSLTVSPGGTVTLTCRSSNGEVTTSNYANWVQQKPGQAPRGLIGGTIKRAPGTPARFSGSLLGGKAALTLSGVQPEDEAVYYCALWYPNLWVFGGGTKLTVLGATPPETGAETESPGETTGGSAESEPPGEGEVQLLESGGGIVQPGGSLKLSCAASGFTFNTYAMNWVRQAPGKGLEWVARIRSKYNNYATYYADSVKDRFTISRDDSKNTVYLQMNNLKTEDTAVYYCVRHENFGNSYVSWFAHWGQGTLVTVSS

SEQ ID NO: 38 - protein, 264 aa, Artificial Sequence
  Description of Artificial Sequence: Synthetic polypeptide
ELVVTQEPSLTVSPGGTVTLTCRSSNGAVTSSNYANWVQQKPGQAPRGLIGGTNKRAPGTPARFSGSSLGGKAALTLSGVQPEDEAVYYCALWYPNLWVFGGGTKLTVLGATPPETGAETESPGETTGGSAESEPPGEGEVQLQESGGGIVQPGGSLKLSCAASGFTFNTYAMNWVRQAPGKGLEWVARIRSKYNNYATYYADSVKDRFTISRDDSKNTVYLQMNNLKTEDTAVYYCVRHENFGNSYVSWFAHWGQGTLVTVSS

SEQ ID NO: 39 - protein, 264 aa, Artificial Sequence
  Description of Artificial Sequence: Synthetic polypeptide
ELVVTQEPSLTVSPGGTVTLTCRSSNGAVTSSNYANWVQQKPGQAPRGLIGGTNKRAPGTPARFSGSLLGGSAALTLSGVQPEDEAVYYCALWYPNLWVFGGGTKLTVLGATPPETGAETESPGETTGGSAESEPPGEGEVQLQESGGGIVQPGGSLKLSCAASGFTFNTYAMNWVRQAPGKGLEWVARIRSKYNNYATYYADSVKDRFTISRDDSKNTVYLQMNNLKTEDTAVYYCVRHENFGNSYVSWFAHWGQGTLVTVSS

SEQ ID NO: 40 - protein, 264 aa, Artificial Sequence
  Description of Artificial Sequence: Synthetic polypeptide
ELVVTQEPSLTVSPGGTVTLTCRSSNGAVTSSNYANWVQQKPGQAPRGLIGGTNKRAPGTPARFSGSSLGGSAALTLSGVQPEDEAVYYCALWYPNLWVFGGGTKLTVLGATPPETGAETESPGETTGGSAESEPPGEGEVQLQESGGGIVQPGGSLKLSCAASGFTFNTYAMNWVRQAPGKGLEWVARIRSKYNNYATYYADSVKDRFTISRDDSKNTVYLQMNNLKTEDTAVYYCVRHENFGNSYVSWFAHWGQGTLVTVSS

SEQ ID NO: 41 - protein, 264 aa, Artificial Sequence
  Description of Artificial Sequence: Synthetic polypeptide
ELVVTQEPSLTVSPGGTVTLTCRSSTGAVTTSNYANWVQQKPGQAPRGLIGGTNKRAPGTPARFSGSLLGGKAALTLSGVQPEDEAEYYCALWYSNLWVFGGGTKLTVLGATPPETGAETESPGETTGGSAESEPPGEGEVQLLESGGGLVQPGGSLKLSCAASGFTFNTYAMNWVRQAPGKGLEWVARIRSKYNNYATYYADSVKDRFTISRDDSKNTAYLQMNNLKTEDTAVYYCVRHGNFGNSYVSWFAYWGQGTLVTVSS

SEQ ID NO: 42 - protein, 16 aa, Artificial Sequence
  Description of Artificial Sequence: Synthetic peptide
EAGRSANHEPLGLVAT

SEQ ID NO: 43 - protein, 16 aa, Artificial Sequence
  Description of Artificial Sequence: Synthetic peptide
ASGRSTNAGPSGLAGP

SEQ ID NO: 44 - protein, 16 aa, Artificial Sequence
  Description of Artificial Sequence: Synthetic peptide
ASGRSTNAGPQGLAGQ

SEQ ID NO: 45 - protein, 16 aa, Artificial Sequence
  Description of Artificial Sequence: Synthetic peptide
ASGRSTNAGPPGLTGP

SEQ ID NO: 46 - protein, 16 aa, Artificial Sequence
  Description of Artificial Sequence: Synthetic peptide
ASSRGTNAGPAGLTGP

SEQ ID NO: 47 - protein, 16 aa, Artificial Sequence
  Description of Artificial Sequence: Synthetic peptide
ASSRTTNTGPSTLTGP

SEQ ID NO: 48 - protein, 16 aa, Artificial Sequence
  Description of Artificial Sequence: Synthetic peptide
AAGRSDNGTPLELVAP

SEQ ID NO: 49 - protein, 16 aa, Artificial Sequence
  Description of Artificial Sequence: Synthetic peptide
ASGRGTNAGPAGLTGP

SEQ ID NO: 50 - protein, 16 aa, Artificial Sequence
  Description of Artificial Sequence: Synthetic peptide
LFGRNDNHEPLELGGG

SEQ ID NO: 51 - protein, 16 aa, Artificial Sequence
  Description of Artificial Sequence: Synthetic peptide
TAGRSDNLEPLGLVFG

SEQ ID NO: 52 - protein, 16 aa, Artificial Sequence
  Description of Artificial Sequence: Synthetic peptide
LDGRSDNFHPPELVAG

SEQ ID NO: 53 - protein, 16 aa, Artificial Sequence
  Description of Artificial Sequence: Synthetic peptide
LEGRSDNEEPENLVAG

SEQ ID NO: 54 - protein, 16 aa, Artificial Sequence
  Description of Artificial Sequence: Synthetic peptide
LKGRSDNNAPLALVAG

SEQ ID NO: 55 - protein, 16 aa, Artificial Sequence
  Description of Artificial Sequence: Synthetic peptide
VYSRGTNAGPHGLTGR

SEQ ID NO: 56 - protein, 16 aa, Artificial Sequence
  Description of Artificial Sequence: Synthetic peptide
ANSRGTNKGFAGLIGP

SEQ ID NO: 57 - protein, 16 aa, Artificial Sequence
  Description of Artificial Sequence: Synthetic peptide
ASSRLTNEAPAGLTIP

SEQ ID NO: 58 - protein, 16 aa, Artificial Sequence
  Description of Artificial Sequence: Synthetic peptide
DQSRGTNAGPEGLTDP

SEQ ID NO: 59 - protein, 16 aa, Artificial Sequence
  Description of Artificial Sequence: Synthetic peptide
ESSRGTNIGQGGLTGP

SEQ ID NO: 60 - protein, 16 aa, Artificial Sequence
  Description of Artificial Sequence: Synthetic peptide
SSSRGTNQDPAGLTIP

SEQ ID NO: 61 - protein, 16 aa, Artificial Sequence
  Description of Artificial Sequence: Synthetic peptide
ASSRGQNHSPMGLTGP

SEQ ID NO: 62 - protein, 16 aa, Artificial Sequence
  Description of Artificial Sequence: Synthetic peptide
AYSRGPNAGPAGLEGR

SEQ ID NO: 63 - protein, 16 aa, Artificial Sequence
  Description of Artificial Sequence: Synthetic peptide
ASERGNNAGPANLTGF

SEQ ID NO: 64 - protein, 16 aa, Artificial Sequence
  Description of Artificial Sequence: Synthetic peptide
ASHRGTNPKPAILTGP

SEQ ID NO: 65 - protein, 16 aa, Artificial Sequence
  Description of Artificial Sequence: Synthetic peptide
MSSRRTNANPAQLTGP

SEQ ID NO: 66 - protein, 16 aa, Artificial Sequence
  Description of Artificial Sequence: Synthetic peptide
GAGRTDNHEPLELGAA

SEQ ID NO: 67 - protein, 16 aa, Artificial Sequence
  Description of Artificial Sequence: Synthetic peptide
LAGRSENTAPLELTAG

SEQ ID NO: 68 - protein, 16 aa, Artificial Sequence
  Description of Artificial Sequence: Synthetic peptide
LEGRPDNHEPLALVAS

SEQ ID NO: 69 - protein, 16 aa, Artificial Sequence
  Description of Artificial Sequence: Synthetic peptide
LSGRSDNEEPLALPAG

SEQ ID NO: 70 - protein, 16 aa, Artificial Sequence
  Description of Artificial Sequence: Synthetic peptide
EAGRTDNHEPLELSAP

SEQ ID NO: 71 - protein, 16 aa, Artificial Sequence
  Description of Artificial Sequence: Synthetic peptide
EGGRSDNHGPLELVSG

SEQ ID NO: 72 - protein, 16 aa, Artificial Sequence
  Description of Artificial Sequence: Synthetic peptide
LSGRSDNEAPLELEAG

SEQ ID NO: 73 - protein, 16 aa, Artificial Sequence
  Description of Artificial Sequence: Synthetic peptide
LGGRADNHEPPELGAG

SEQ ID NO: 74 - protein, 16 aa, Artificial Sequence
  Description of Artificial Sequence: Synthetic peptide
PPSRGTNAEPAGLTGE

SEQ ID NO: 75 - protein, 16 aa, Artificial Sequence
  Description of Artificial Sequence: Synthetic peptide
ASTRGENAGPAGLEAP

SEQ ID NO: 76 - protein, 16 aa, Artificial Sequence
  Description of Artificial Sequence: Synthetic peptide
ESSRGTNGAPEGLTGP

SEQ ID NO: 77 - protein, 16 aa, Artificial Sequence
  Description of Artificial Sequence: Synthetic peptide
ASSRATNESPAGLTGE

SEQ ID NO: 78 - protein, 16 aa, Artificial Sequence
  Description of Artificial Sequence: Synthetic peptide
ASSRGENPPPGGLTGP

SEQ ID NO: 79 - protein, 16 aa, Artificial Sequence
  Description of Artificial Sequence: Synthetic peptide
AASRGTNTGPAELTGS

SEQ ID NO: 80 - protein, 16 aa, Artificial Sequence
  Description of Artificial Sequence: Synthetic peptide
AGSRTTNAGPGGLEGP

SEQ ID NO: 81 - protein, 16 aa, Artificial Sequence
  Description of Artificial Sequence: Synthetic peptide
APSRGENAGPATLTGA

SEQ ID NO: 82 - protein, 16 aa, Artificial Sequence
  Description of Artificial Sequence: Synthetic peptide
ESGRAANTGPPTLTAP

SEQ ID NO: 83 - protein, 16 aa, Artificial Sequence
  Description of Artificial Sequence: Synthetic peptide
NPGRAANEGPPGLPGS

SEQ ID NO: 84 - protein, 16 aa, Artificial Sequence
  Description of Artificial Sequence: Synthetic peptide
ESSRAANLTPPELTGP

SEQ ID NO: 85 - protein, 16 aa, Artificial Sequence
  Description of Artificial Sequence: Synthetic peptide
ASGRAANETPPGLTGA

SEQ ID NO: 86 - protein, 16 aa, Artificial Sequence
  Description of Artificial Sequence: Synthetic peptide
NSGRGENLGAPGLTGT

SEQ ID NO: 87 - protein, 16 aa, Artificial Sequence
  Description of Artificial Sequence: Synthetic peptide
TTGRAANLTPAGLTGP

SEQ ID NO: 88 - protein, 16 aa, Artificial Sequence
  Description of Artificial Sequence: Synthetic peptide
EAGRSANHTPAGLTGP

SEQ ID NO: 89 - protein, 16 aa, Artificial Sequence
  Description of Artificial Sequence: Synthetic peptide
ESGRAANTTPAGLTGP

SEQ ID NO: 90 - protein, 19 aa, Artificial Sequence
  Description of Artificial Sequence: Synthetic peptide
TTGRATEAANLTPAGLTGP

SEQ ID NO: 91 - protein, 19 aa, Artificial Sequence
  Description of Artificial Sequence: Synthetic peptide
TTGRAEEAANLTPAGLTGP

SEQ ID NO: 92 - protein, 19 aa, Artificial Sequence
  Description of Artificial Sequence: Synthetic peptide
TTGRAGEAANLTPAGLTGP

SEQ ID NO: 93 - protein, 19 aa, Artificial Sequence
  Description of Artificial Sequence: Synthetic peptide
TTGRATEAANATPAGLTGP

SEQ ID NO: 94 - protein, 19 aa, Artificial Sequence
  Description of Artificial Sequence: Synthetic peptide
TTGRAGEAEGATSAGATGP

SEQ ID NO: 95 - protein, 19 aa, Artificial Sequence
  Description of Artificial Sequence: Synthetic peptide
TTGEAGEAANATSAGATGP

SEQ ID NO: 96 - protein, 19 aa, Artificial Sequence
  Description of Artificial Sequence: Synthetic peptide
TTGEAGEAAGLTPAGLTGP

SEQ ID NO: 97 - protein, 19 aa, Artificial Sequence
  Description of Artificial Sequence: Synthetic peptide
TTGAAGEAANATPAGLTGP

SEQ ID NO: 98 - protein, 19 aa, Artificial Sequence
  Description of Artificial Sequence: Synthetic peptide
TTGRAGEAAGLTPAGLTGP

SEQ ID NO: 99 - protein, 19 aa, Artificial Sequence
  Description of Artificial Sequence: Synthetic peptide
TTGRAGEAANATSAGATGP

SEQ ID NO: 100 - protein, 19 aa, Artificial Sequence
  Description of Artificial Sequence: Synthetic peptide
TTGEAGEAAGATSAGATGP

SEQ ID NO: 101 - protein, 16 aa, Artificial Sequence
  Description of Artificial Sequence: Synthetic peptide
ESGRAANTEPPELGAG

SEQ ID NO: 102 - protein, 16 aa, Artificial Sequence
  Description of Artificial Sequence: Synthetic peptide
ESGRAANTAPEGLTGP

SEQ ID NO: 103 - protein, 16 aa, Artificial Sequence
  Description of Artificial Sequence: Synthetic peptide
EPGRAANHEPSGLTEG

SEQ ID NO: 104 - protein, 19 aa, Artificial Sequence
  Description of Artificial Sequence: Synthetic peptide
ESGRAANHTGAPPGGLTGP

SEQ ID NO: 105 - protein, 19 aa, Artificial Sequence
  Description of Artificial Sequence: Synthetic peptide
TTGRTGEGANATPGGLTGP

SEQ ID NO: 106 - protein, 19 aa, Artificial Sequence
  Description of Artificial Sequence: Synthetic peptide
RTGRSGEAANETPEGLEGP

SEQ ID NO: 107 - protein, 19 aa, Artificial Sequence
  Description of Artificial Sequence: Synthetic peptide
RTGRTGESANETPAGLGGP

SEQ ID NO: 108 - protein, 19 aa, Artificial Sequence
  Description of Artificial Sequence: Synthetic peptide
STGRTGEPANETPAGLSGP

SEQ ID NO: 109 - protein, 19 aa, Artificial Sequence
  Description of Artificial Sequence: Synthetic peptide
TTGRAGEPANATPTGLSGP

SEQ ID NO: 110 - protein, 19 aa, Artificial Sequence
  Description of Artificial Sequence: Synthetic peptide
RTGRPGEGANATPTGLPGP

SEQ ID NO: 111 - protein, 19 aa, Artificial Sequence
  Description of Artificial Sequence: Synthetic peptide
RTGRGGEAANATPSGLGGP

SEQ ID NO: 112 - protein, 19 aa, Artificial Sequence
  Description of Artificial Sequence: Synthetic peptide
STGRSGESANATPGGLGGP

SEQ ID NO: 113 - protein, 19 aa, Artificial Sequence
  Description of Artificial Sequence: Synthetic peptide
RTGRTGEEANATPAGLPGP

SEQ ID NO: 114 - protein, 19 aa, Artificial Sequence
  Description of Artificial Sequence: Synthetic peptide
ATGRPGEPANTTPEGLEGP

SEQ ID NO: 115 - protein, 19 aa, Artificial Sequence
  Description of Artificial Sequence: Synthetic peptide
STGRSGEPANATPGGLTGP

SEQ ID NO: 116 - protein, 19 aa, Artificial Sequence
  Description of Artificial Sequence: Synthetic peptide
PTGRGGEGANTTPTGLPGP

SEQ ID NO: 117 - protein, 19 aa, Artificial Sequence
  Description of Artificial Sequence: Synthetic peptide
PTGRSGEGANATPSGLTGP

SEQ ID NO: 118 - protein, 19 aa, Artificial Sequence
  Description of Artificial Sequence: Synthetic peptide
TTGRASEGANSTPAPLTEP

SEQ ID NO: 119 - protein, 19 aa, Artificial Sequence
  Description of Artificial Sequence: Synthetic peptide
TYGRAAEAANTTPAGLTAP

SEQ ID NO: 120 - protein, 19 aa, Artificial Sequence
  Description of Artificial Sequence: Synthetic peptide
TTGRATEGANATPAELTEP

SEQ ID NO: 121 - protein, 19 aa, Artificial Sequence
  Description of Artificial Sequence: Synthetic peptide
TVGRASEEANTTPASLTGP

SEQ ID NO: 122 - protein, 19 aa, Artificial Sequence
  Description of Artificial Sequence: Synthetic peptide
TTGRAPEAANATPAPLTGP

SEQ ID NO: 123 - protein, 19 aa, Artificial Sequence
  Description of Artificial Sequence: Synthetic peptide
TWGRATEPANATPAPLTSP

SEQ ID NO: 124 - protein, 19 aa, Artificial Sequence
  Description of Artificial Sequence: Synthetic peptide
TVGRASESANATPAELTSP

SEQ ID NO: 125 - protein, 19 aa, Artificial Sequence
  Description of Artificial Sequence: Synthetic peptide
TVGRAPEGANSTPAGLTGP

SEQ ID NO: 126 - protein, 19 aa, Artificial Sequence
  Description of Artificial Sequence: Synthetic peptide
TWGRATEAPNLEPATLTTP

SEQ ID NO: 127 - protein, 19 aa, Artificial Sequence
  Description of Artificial Sequence: Synthetic peptide
TTGRATEAPNLTPAPLTEP

SEQ ID NO: 128 - protein, 19 aa, Artificial Sequence
  Description of Artificial Sequence: Synthetic peptide
TQGRATEAPNLSPAALTSP

SEQ ID NO: 129 - protein, 19 aa, Artificial Sequence
  Description of Artificial Sequence: Synthetic peptide
TQGRAAEAPNLTPATLTAP

SEQ ID NO: 130 - protein, 19 aa, Artificial Sequence
  Description of Artificial Sequence: Synthetic peptide
TSGRAPEATNLAPAPLTGP

SEQ ID NO: 131 - protein, 19 aa, Artificial Sequence
  Description of Artificial Sequence: Synthetic peptide
TQGRAAEAANLTPAGLTEP

SEQ ID NO: 132 - protein, 19 aa, Artificial Sequence
  Description of Artificial Sequence: Synthetic peptide
TTGRAGSAPNLPPTGLTTP

SEQ ID NO: 133 - protein, 19 aa, Artificial Sequence
  Description of Artificial Sequence: Synthetic peptide
TTGRAGGAENLPPEGLTAP

SEQ ID NO: 134 - protein, 19 aa, Artificial Sequence
  Description of Artificial Sequence: Synthetic peptide
TTSRAGTATNLTPEGLTAP

SEQ ID NO: 135 - protein, 19 aa, Artificial Sequence
  Description of Artificial Sequence: Synthetic peptide
TTGRAGTATNLPPSGLTTP

SEQ ID NO: 136 - protein, 19 aa, Artificial Sequence
  Description of Artificial Sequence: Synthetic peptide
TTARAGEAENLSPSGLTAP

SEQ ID NO: 137 - protein, 19 aa, Artificial Sequence
  Description of Artificial Sequence: Synthetic peptide
TTGRAGGAGNLAPGGLTEP

SEQ ID NO: 138 - protein, 19 aa, Artificial Sequence
  Description of Artificial Sequence: Synthetic peptide
TTGRAGTATNLPPEGLTGP

SEQ ID NO: 139 - protein, 19 aa, Artificial Sequence
  Description of Artificial Sequence: Synthetic peptide
TTGRAGGAANLAPTGLTEP

SEQ ID NO: 140 - protein, 19 aa, Artificial Sequence
  Description of Artificial Sequence: Synthetic peptide
TTGRAGTAENLAPSGLTTP

SEQ ID NO: 141 - protein, 19 aa, Artificial Sequence
  Description of Artificial Sequence: Synthetic peptide
TTGRAGSATNLGPGGLTGP

SEQ ID NO: 142 - protein, 19 aa, Artificial Sequence
  Description of Artificial Sequence: Synthetic peptide
TTARAGGAENLTPAGLTEP

SEQ ID NO: 143 - protein, 19 aa, Artificial Sequence
  Description of Artificial Sequence: Synthetic peptide
TTARAGSAENLSPSGLTGP

SEQ ID NO: 144 - protein, 19 aa, Artificial Sequence
  Description of Artificial Sequence: Synthetic peptide
TTARAGGAGNLAPEGLTTP

SEQ ID NO: 145 - protein, 19 aa, Artificial Sequence
  Description of Artificial Sequence: Synthetic peptide
TTSRAGAAENLTPTGLTGP

SEQ ID NO: 146 - protein, 19 aa, Artificial Sequence
  Description of Artificial Sequence: Synthetic peptide
TYGRTTTPGNEPPASLEAE

SEQ ID NO: 147 - protein, 19 aa, Artificial Sequence
  Description of Artificial Sequence: Synthetic peptide
TYSRGESGPNEPPPGLTGP

SEQ ID NO: 148 - protein, 19 aa, Artificial Sequence
  Description of Artificial Sequence: Synthetic peptide
AWGRTGASENETPAPLGGE

SEQ ID NO: 149 - protein, 19 aa, Artificial Sequence
  Description of Artificial Sequence: Synthetic peptide
RWGRAETTPNTPPEGLETE

SEQ ID NO: 150 - protein, 19 aa, Artificial Sequence
  Description of Artificial Sequence: Synthetic peptide
ESGRAANHTGAEPPELGAG

SEQ ID NO: 151 - protein, 19 aa, Artificial Sequence
  Description of Artificial Sequence: Synthetic peptide
TTGRAGEAANLTPAGLTES

SEQ ID NO: 152 - protein, 19 aa, Artificial Sequence
  Description of Artificial Sequence: Synthetic peptide
TTGRAGEAANLTPAALTES

SEQ ID NO: 153 - protein, 19 aa, Artificial Sequence
  Description of Artificial Sequence: Synthetic peptide
TTGRAGEAANLTPAPLTES

SEQ ID NO: 154 - protein, 19 aa, Artificial Sequence
  Description of Artificial Sequence: Synthetic peptide
TTGRAGEAANLTPEPLTES

SEQ ID NO: 155 - protein, 19 aa, Artificial Sequence
  Description of Artificial Sequence: Synthetic peptide
TTGRAGEAANLTPAGLTGA

SEQ ID NO: 156 - protein, 19 aa, Artificial Sequence
  Description of Artificial Sequence: Synthetic peptide
TTGRAGEAANLTPEGLTGA

SEQ ID NO: 157 - protein, 19 aa, Artificial Sequence
  Description of Artificial Sequence: Synthetic peptide
TTGRAGEAANLTPEPLTGA

SEQ ID NO: 158 - protein, 19 aa, Artificial Sequence
  Description of Artificial Sequence: Synthetic peptide
TTGRAGEAANLTPAGLTEA

SEQ ID NO: 159 - protein, 19 aa, Artificial Sequence
  Description of Artificial Sequence: Synthetic peptide
TTGRAGEAANLTPEGLTEA

SEQ ID NO: 160 - protein, 19 aa, Artificial Sequence
  Description of Artificial Sequence: Synthetic peptide
TTGRAGEAANLTPAPLTEA

SEQ ID NO: 161 - protein, 19 aa, Artificial Sequence
  Description of Artificial Sequence: Synthetic peptide
TTGRAGEAANLTPEPLTEA

SEQ ID NO: 162 - protein, 19 aa, Artificial Sequence
  Description of Artificial Sequence: Synthetic peptide
TTGRAGEAANLTPEPLTGP

SEQ ID NO: 163 - protein, 19 aa, Artificial Sequence
  Description of Artificial Sequence: Synthetic peptide
TTGRAGEAANLTPAGLTGG

SEQ ID NO: 164 - protein, 19 aa, Artificial Sequence
  Description of Artificial Sequence: Synthetic peptide
TTGRAGEAANLTPEGLTGG

SEQ ID NO: 165 - protein, 19 aa, Artificial Sequence
  Description of Artificial Sequence: Synthetic peptide
TTGRAGEAANLTPEALTGG

SEQ ID NO: 166 - protein, 19 aa, Artificial Sequence
  Description of Artificial Sequence: Synthetic peptide
TTGRAGEAANLTPEPLTGG

SEQ ID NO: 167 - protein, 19 aa, Artificial Sequence
  Description of Artificial Sequence: Synthetic peptide
TTGRAGEAANLTPAGLTEG

SEQ ID NO: 168 - protein, 19 aa, Artificial Sequence
  Description of Artificial Sequence: Synthetic peptide
TTGRAGEAANLTPEGLTEG

SEQ ID NO: 169 - protein, 19 aa, Artificial Sequence
  Description of Artificial Sequence: Synthetic peptide
TTGRAGEAANLTPAPLTEG

SEQ ID NO: 170 - protein, 19 aa, Artificial Sequence
  Description of Artificial Sequence: Synthetic peptide
TTGRAGEAANLTPEPLTEG

SEQ ID NO: 171 - protein, 29 aa, Artificial Sequence
  Description of Artificial Sequence: Synthetic peptide
GSAPGSAGGYAELRMGGAIATSGSETPGT

SEQ ID NO: 172 - protein, 29 aa, Artificial Sequence
  Description of Artificial Sequence: Synthetic peptide
GSAPGTGGGYAPLRMGGGAATSGSETPGT

SEQ ID NO: 173 - protein, 29 aa, Artificial Sequence
  Description of Artificial Sequence: Synthetic peptide
GSAPGAEGGYAALRMGGEIATSGSETPGT

SEQ ID NO: 174 - protein, 29 aa, Artificial Sequence
  Description of Artificial Sequence: Synthetic peptide
GSAPGGPGGYALLRMGGPAATSGSETPGT

SEQ ID NO: 175 - protein, 29 aa, Artificial Sequence
  Description of Artificial Sequence: Synthetic peptide
GSAPGEAGGYAFLRMGGSIATSGSETPGT

SEQ ID NO: 176 - protein, 29 aa, Artificial Sequence
  Description of Artificial Sequence: Synthetic peptide
GSAPGPGGGYASLRMGGTAATSGSETPGT

SEQ ID NO: 177 - protein, 29 aa, Artificial Sequence
  Description of Artificial Sequence: Synthetic peptide
GSAPGSEGGYATLRMGGAIATSGSETPGT

SEQ ID NO: 178 - protein, 29 aa, Artificial Sequence
  Description of Artificial Sequence: Synthetic peptide
GSAPGTPGGYANLRMGGGAATSGSETPGT

SEQ ID NO: 179 - protein, 29 aa, Artificial Sequence
  Description of Artificial Sequence: Synthetic peptide
GSAPGASGGYAHLRMGGEIATSGSETPGT

SEQ ID NO: 180 - protein, 29 aa, Artificial Sequence
  Description of Artificial Sequence: Synthetic peptide
GSAPGGTGGYGELRMGGPAATSGSETPGT

SEQ ID NO: 181 - protein, 29 aa, Artificial Sequence
  Description of Artificial Sequence: Synthetic peptide
GSAPGEAGGYPELRMGGSIATSGSETPGT

SEQ ID NO: 182 - protein, 29 aa, Artificial Sequence
  Description of Artificial Sequence: Synthetic peptide
GSAPGPGGGYVELRMGGTAATSGSETPGT

SEQ ID NO: 183 - protein, 29 aa, Artificial Sequence
  Description of Artificial Sequence: Synthetic peptide
GSAPGSEGGYLELRMGGAIATSGSETPGT

SEQ ID NO: 184 - protein, 29 aa, Artificial Sequence
  Description of Artificial Sequence: Synthetic peptide
GSAPGTPGGYSELRMGGGAATSGSETPGT

SEQ ID NO: 185 - protein, 29 aa, Artificial Sequence
  Description of Artificial Sequence: Synthetic peptide
GSAPGASGGYTELRMGGEIATSGSETPGT

SEQ ID NO: 186 - protein, 29 aa, Artificial Sequence
  Description of Artificial Sequence: Synthetic peptide
GSAPGGTGGYQELRMGGPAATSGSETPGT

SEQ ID NO: 187 - protein, 29 aa, Artificial Sequence
  Description of Artificial Sequence: Synthetic peptide
GSAPGEAGGYEELRMGGSIATSGSETPGT

SEQ ID NO: 188 - protein, 29 aa, Artificial Sequence
  Description of Artificial Sequence: Synthetic peptide
GSAPGPGIGPAELRMGGTAATSGSETPGT

SEQ ID NO: 189 - protein, 29 aa, Artificial Sequence
  Description of Artificial Sequence: Synthetic peptide
GSAPGSEIGAAELRMGGAIATSGSETPGT

SEQ ID NO: 190 - protein, 29 aa, Artificial Sequence
  Description of Artificial Sequence: Synthetic peptide
GSAPGTPIGSAELRMGGGAATSGSETPGT

SEQ ID NO: 191 - protein, 29 aa, Artificial Sequence
  Description of Artificial Sequence: Synthetic peptide
GSAPGASIGTAELRMGGEIATSGSETPGT

SEQ ID NO: 192 - protein, 29 aa, Artificial Sequence
  Description of Artificial Sequence: Synthetic peptide
GSAPGGTIGNAELRMGGPAATSGSETPGT

SEQ ID NO: 193 - protein, 29 aa, Artificial Sequence
  Description of Artificial Sequence: Synthetic peptide
GSAPGEAIGQAELRMGGSIATSGSETPGT

SEQ ID NO: 194 - protein, 29 aa, Artificial Sequence
  Description of Artificial Sequence: Synthetic peptide
GSAPGPGGPYAELRMGGTAATSGSETPGT

SEQ ID NO: 195 - protein, 29 aa, Artificial Sequence
  Description of Artificial Sequence: Synthetic peptide
GSAPGSEGAYAELRMGGAIATSGSETPGT

SEQ ID NO: 196 - protein, 29 aa, Artificial Sequence
  Description of Artificial Sequence: Synthetic peptide
GSAPGTPGVYAELRMGGGAATSGSETPGT

SEQ ID NO: 197 - protein, 29 aa, Artificial Sequence
  Description of Artificial Sequence: Synthetic peptide
GSAPGASGLYAELRMGGEIATSGSETPGT

SEQ ID NO: 198 - protein, 29 aa, Artificial Sequence
  Description of Artificial Sequence: Synthetic peptide
GSAPGGTGIYAELRMGGPAATSGSETPGT

SEQ ID NO: 199 - protein, 29 aa, Artificial Sequence
  Description of Artificial Sequence: Synthetic peptide
GSAPGEAGFYAELRMGGSIATSGSETPGT

SEQ ID NO: 200 - protein, 29 aa, Artificial Sequence
  Description of Artificial Sequence: Synthetic peptide
GSAPGPGGYYAELRMGGTAATSGSETPGT

SEQ ID NO: 201 - protein, 29 aa, Artificial Sequence
  Description of Artificial Sequence: Synthetic peptide
GSAPGSEGSYAELRMGGAIATSGSETPGT

SEQ ID NO: 202 - protein, 29 aa, Artificial Sequence
  Description of Artificial Sequence: Synthetic peptide
GSAPGTPGNYAELRMGGGAATSGSETPGT

SEQ ID NO: 203 - protein, 29 aa, Artificial Sequence
  Description of Artificial Sequence: Synthetic peptide
GSAPGASGEYAELRMGGEIATSGSETPGT

SEQ ID NO: 204 - protein, 29 aa, Artificial Sequence
  Description of Artificial Sequence: Synthetic peptide
GSAPGGTGHYAELRMGGPAATSGSETPGT

SEQ ID NO: 205 - protein, 29 aa, Artificial Sequence
  Description of Artificial Sequence: Synthetic peptide
GSAPGEAGGYAEARMGGSIATSGSETPGT

SEQ ID NO: 206 - protein, 29 aa, Artificial Sequence
  Description of Artificial Sequence: Synthetic peptide
GSAPGPGGGYAEVRMGGTAATSGSETPGT

SEQ ID NO: 207 - protein, 29 aa, Artificial Sequence
  Description of Artificial Sequence: Synthetic peptide
GSAPGSEGGYAEIRMGGAIATSGSETPGT

SEQ ID NO: 208 - protein, 29 aa, Artificial Sequence
  Description of Artificial Sequence: Synthetic peptide
GSAPGTPGGYAEFRMGGGAATSGSETPGT

SEQ ID NO: 209 - protein, 29 aa, Artificial Sequence
  Description of Artificial Sequence: Synthetic peptide
GSAPGASGGYAEYRMGGEIATSGSETPGT

SEQ ID NO: 210 - protein, 29 aa, Artificial Sequence
  Description of Artificial Sequence: Synthetic peptide
GSAPGGTGGYAESRMGGPAATSGSETPGT

SEQ ID NO: 211 - protein, 29 aa, Artificial Sequence
  Description of Artificial Sequence: Synthetic peptide
GSAPGEAGGYAETRMGGSIATSGSETPGT

SEQ ID NO: 212 - protein, 29 aa, Artificial Sequence
  Description of Artificial Sequence: Synthetic peptide
GSAPGPGGGYAELAMGGTRATSGSETPGT

SEQ ID NO: 213 - protein, 29 aa, Artificial Sequence
  Description of Artificial Sequence: Synthetic peptide
GSAPGSEGGYAELVMGGARATSGSETPGT

SEQ ID NO: 214 - protein, 29 aa, Artificial Sequence
  Description of Artificial Sequence: Synthetic peptide
GSAPGTPGGYAELLMGGGRATSGSETPGT

SEQ ID NO: 215 - protein, 29 aa, Artificial Sequence
  Description of Artificial Sequence: Synthetic peptide
GSAPGASGGYAELIMGGERATSGSETPGT

SEQ ID NO: 216 - protein, 29 aa, Artificial Sequence
  Description of Artificial Sequence: Synthetic peptide
GSAPGGTGGYAELWMGGPRATSGSETPGT

SEQ ID NO: 217 - protein, 29 aa, Artificial Sequence
  Description of Artificial Sequence: Synthetic peptide
GSAPGEAGGYAELSMGGSRATSGSETPGT

SEQ ID NO: 218 - protein, 29 aa, Artificial Sequence
  Description of Artificial Sequence: Synthetic peptide
GSAPGPGGGYAELTMGGTRATSGSETPGT

SEQ ID NO: 219 - protein, 29 aa, Artificial Sequence
  Description of Artificial Sequence: Synthetic peptide
GSAPGSEGGYAELQMGGARATSGSETPGT

SEQ ID NO: 220 - protein, 29 aa, Artificial Sequence
  Description of Artificial Sequence: Synthetic peptide
GSAPGTPGGYAELNMGGGRATSGSETPGT

SEQ ID NO: 221 - protein, 29 aa, Artificial Sequence
  Description of Artificial Sequence: Synthetic peptide
GSAPGASGGYAELEMGGERATSGSETPGT

SEQ ID NO: 222 - protein, 29 aa, Artificial Sequence
  Description of Artificial Sequence: Synthetic peptide
GSAPGGTGGYAELRPGGPIATSGSETPGT

SEQ ID NO: 223 - protein, 29 aa, Artificial Sequence
  Description of Artificial Sequence: Synthetic peptide
GSAPGEAGGYAELRAGGSAATSGSETPGT

SEQ ID NO: 224 - protein, 29 aa, Artificial Sequence
  Description of Artificial Sequence: Synthetic peptide
GSAPGPGGGYAELRLGGTIATSGSETPGT

SEQ ID NO: 225 - protein, 29 aa, Artificial Sequence
  Description of Artificial Sequence: Synthetic peptide
GSAPGSEGGYAELRIGGAAATSGSETPGT

SEQ ID NO: 226 - protein, 29 aa, Artificial Sequence
  Description of Artificial Sequence: Synthetic peptide
GSAPGTPGGYAELRSGGGIATSGSETPGT

SEQ ID NO: 227 - protein, 29 aa, Artificial Sequence
  Description of Artificial Sequence: Synthetic peptide
GSAPGASGGYAELRNGGEAATSGSETPGT

SEQ ID NO: 228 - protein, 29 aa, Artificial Sequence
  Description of Artificial Sequence: Synthetic peptide
GSAPGGTGGYAELRQGGPIATSGSETPGT

SEQ ID NO: 229 - protein, 29 aa, Artificial Sequence
  Description of Artificial Sequence: Synthetic peptide
GSAPGEAGGYAELRDGGSAATSGSETPGT

SEQ ID NO: 230 - protein, 29 aa, Artificial Sequence
  Description of Artificial Sequence: Synthetic peptide
GSAPGPGGGYAELREGGTIATSGSETPGT

SEQ ID NO: 231 - protein, 29 aa, Artificial Sequence
  Description of Artificial Sequence: Synthetic peptide
GSAPGSEGGYAELRHGGAAATSGSETPGT

SEQ ID NO: 232 - protein, 29 aa, Artificial Sequence
  Description of Artificial Sequence: Synthetic peptide
GSAPGTPGGYAELRMPGGIATSGSETPGT

SEQ ID NO: 233 - protein, 29 aa, Artificial Sequence
  Description of Artificial Sequence: Synthetic peptide
GSAPGASGGYAELRMAGEAATSGSETPGT

SEQ ID NO: 234 - protein, 29 aa, Artificial Sequence
  Description of Artificial Sequence: Synthetic peptide
GSAPGGTGGYAELRMVGPIATSGSETPGT

SEQ ID NO: 235 - protein, 29 aa, Artificial Sequence
  Description of Artificial Sequence: Synthetic peptide
GSAPGEAGGYAELRMLGSAATSGSETPGT

SEQ ID NO: 236 - protein, 29 aa, Artificial Sequence
  Description of Artificial Sequence: Synthetic peptide
GSAPGPGGGYAELRMIGTIATSGSETPGT

SEQ ID NO: 237 - protein, 29 aa, Artificial Sequence
  Description of Artificial Sequence: Synthetic peptide
GSAPGSEGGYAELRMYGAIATSGSETPGT

SEQ ID NO: 238 - protein, 29 aa, Artificial Sequence
  Description of Artificial Sequence: Synthetic peptide
GSAPGTPGGYAELRMSGGAATSGSETPGT

SEQ ID NO: 239 - protein, 29 aa, Artificial Sequence
  Description of Artificial Sequence: Synthetic peptide
GSAPGASGGYAELRMNGEIATSGSETPGT

SEQ ID NO: 240 - protein, 29 aa, Artificial Sequence
  Description of Artificial Sequence: Synthetic peptide
GSAPGGTGGYAELRMQGPAATSGSETPGT

SEQ ID NO: 241 - protein, 29 aa, Artificial Sequence
  Description of Artificial Sequence: Synthetic peptide
GSAPGANHTPAGLTGPGARATSGSETPGT

SEQ ID NO: 242 - protein, 29 aa, Artificial Sequence
  Description of Artificial Sequence: Synthetic peptide
GSAPGANTAPEGLTGPSTRATSGSETPGT

SEQ ID NO: 243 - protein, 29 aa, Artificial Sequence
  Description of Artificial Sequence: Synthetic peptide
GSAPGTGAPPGGLTGPGTRATSGSETPGT

SEQ ID NO: 244 - protein, 29 aa, Artificial Sequence
  Description of Artificial Sequence: Synthetic peptide
GSAPGANHEPSGLTEGSPRATSGSETPGT

SEQ ID NO: 245 - protein, 29 aa, Artificial Sequence
  Description of Artificial Sequence: Synthetic peptide
GSAPGANTEPPELGAGTERATSGSETPGT

SEQ ID NO: 246 - protein, 29 aa, Artificial Sequence
  Description of Artificial Sequence: Synthetic peptide
GSAPGASGPPPGLTGPPGRATSGSETPGT

SEQ ID NO: 247 - protein, 29 aa, Artificial Sequence
  Description of Artificial Sequence: Synthetic peptide
GSAPGASGTPAPLGGEPGRATSGSETPGT

SEQ ID NO: 248 - protein, 29 aa, Artificial Sequence
  Description of Artificial Sequence: Synthetic peptide
GSAPGPAGPPEGLETEAGRATSGSETPGT

SEQ ID NO: 249 - protein, 29 aa, Artificial Sequence
  Description of Artificial Sequence: Synthetic peptide
GSAPGPTSGQGGLTGPESRATSGSETPGT

SEQ ID NO: 250 - protein, 29 aa, Artificial Sequence
  Description of Artificial Sequence: Synthetic peptide
GSAPGSAGGAANLVRGGAIATSGSETPGT

SEQ ID NO: 251 - protein, 29 aa, Artificial Sequence
  Description of Artificial Sequence: Synthetic peptide
GSAPGTGGGAAPLVRGGGAATSGSETPGT

SEQ ID NO: 252 - protein, 29 aa, Artificial Sequence
  Description of Artificial Sequence: Synthetic peptide
GSAPGAEGGAAALVRGGEIATSGSETPGT

SEQ ID NO: 253 - protein, 29 aa, Artificial Sequence
  Description of Artificial Sequence: Synthetic peptide
GSAPGGPGGAALLVRGGPAATSGSETPGT

SEQ ID NO: 254 - protein, 29 aa, Artificial Sequence
  Description of Artificial Sequence: Synthetic peptide
GSAPGEAGGAAFLVRGGSIATSGSETPGT

SEQ ID NO: 255 - protein, 29 aa, Artificial Sequence
  Description of Artificial Sequence: Synthetic peptide
GSAPGPGGGAASLVRGGTAATSGSETPGT

SEQ ID NO: 256 - protein, 29 aa, Artificial Sequence
  Description of Artificial Sequence: Synthetic peptide
GSAPGSEGGAATLVRGGAIATSGSETPGT

SEQ ID NO: 257 - protein, 29 aa, Artificial Sequence
  Description of Artificial Sequence: Synthetic peptide
GSAPGTPGGAAGLVRGGGAATSGSETPGT

SEQ ID NO: 258 - protein, 29 aa, Artificial Sequence
  Description of Artificial Sequence: Synthetic peptide
GSAPGASGGAADLVRGGEIATSGSETPGT

SEQ ID NO: 259 - protein, 29 aa, Artificial Sequence
  Description of Artificial Sequence: Synthetic peptide
GSAPGGTGGAGNLVRGGPAATSGSETPGT

SEQ ID NO: 260 - protein, 29 aa, Artificial Sequence
  Description of Artificial Sequence: Synthetic peptide
GSAPGEAGGAPNLVRGGSIATSGSETPGT

SEQ ID NO: 261 - protein, 29 aa, Artificial Sequence
  Description of Artificial Sequence: Synthetic peptide
GSAPGPGGGAVNLVRGGTAATSGSETPGT

SEQ ID NO: 262 - protein, 29 aa, Artificial Sequence
  Description of Artificial Sequence: Synthetic peptide
GSAPGSEGGALNLVRGGAIATSGSETPGT

SEQ ID NO: 263 - protein, 29 aa, Artificial Sequence
  Description of Artificial Sequence: Synthetic peptide
GSAPGTPGGASNLVRGGGAATSGSETPGT

SEQ ID NO: 264 - protein, 29 aa, Artificial Sequence
  Description of Artificial Sequence: Synthetic peptide
GSAPGASGGATNLVRGGEIATSGSETPGT

SEQ ID NO: 265 - protein, 29 aa, Artificial Sequence
  Description of Artificial Sequence: Synthetic peptide
GSAPGGTGGAQNLVRGGPAATSGSETPGT

SEQ ID NO: 266 - protein, 29 aa, Artificial Sequence
  Description of Artificial Sequence: Synthetic peptide
GSAPGEAGGAENLVRGGSIATSGSETPGT

SEQ ID NO: 267 - protein, 30 aa, Artificial Sequence
  Description of Artificial Sequence: Synthetic polypeptide
GSAPEAGRSANHEPLGLVATATSGSETPGT

SEQ ID NO: 268 - protein, 30 aa, Artificial Sequence
  Description of Artificial Sequence: Synthetic polypeptide
GSAPASGRSTNAGPSGLAGPATSGSETPGT

SEQ ID NO: 269 - protein, 30 aa, Artificial Sequence
  Description of Artificial Sequence: Synthetic polypeptide
GSAPASGRSTNAGPQGLAGQATSGSETPGT

SEQ ID NO: 270 - protein, 30 aa, Artificial Sequence
  Description of Artificial Sequence: Synthetic polypeptide
GSAPASGRSTNAGPPGLTGPATSGSETPGT

SEQ ID NO: 271 - protein, 30 aa, Artificial Sequence
  Description of Artificial Sequence: Synthetic polypeptide
GSAPASSRGTNAGPAGLTGPATSGSETPGT

SEQ ID NO: 272 - protein, 30 aa, Artificial Sequence
  Description of Artificial Sequence: Synthetic polypeptide
GSAPASSRTTNTGPSTLTGPATSGSETPGT

SEQ ID NO: 273 - protein, 30 aa, Artificial Sequence
  Description of Artificial Sequence: Synthetic polypeptide
GSAPAAGRSDNGTPLELVAPATSGSETPGT

SEQ ID NO: 274 - protein, 30 aa, Artificial Sequence
  Description of Artificial Sequence: Synthetic polypeptide
GSAPASGRGTNAGPAGLTGPATSGSETPGT

SEQ ID NO: 275 - protein, 30 aa, Artificial Sequence
  Description of Artificial Sequence: Synthetic polypeptide
GSAPLFGRNDNHEPLELGGGATSGSETPGT

SEQ ID NO: 276 - protein, 30 aa, Artificial Sequence
  Description of Artificial Sequence: Synthetic polypeptide
GSAPTAGRSDNLEPLGLVFGATSGSETPGT

SEQ ID NO: 277 - protein, 30 aa, Artificial Sequence
  Description of Artificial Sequence: Synthetic polypeptide
GSAPLDGRSDNFHPPELVAGATSGSETPGT

SEQ ID NO: 278 - protein, 30 aa, Artificial Sequence
  Description of Artificial Sequence: Synthetic polypeptide
GSAPLEGRSDNEEPENLVAGATSGSETPGT

SEQ ID NO: 279 - protein, 30 aa, Artificial Sequence
  Description of Artificial Sequence: Synthetic polypeptide
GSAPLKGRSDNNAPLALVAGATSGSETPGT

SEQ ID NO: 280 - protein, 30 aa, Artificial Sequence
  Description of Artificial Sequence: Synthetic polypeptide
GSAPVYSRGTNAGPHGLTGRATSGSETPGT

SEQ ID NO: 281 - protein, 30 aa, Artificial Sequence
  Description of Artificial Sequence: Synthetic polypeptide
GSAPANSRGTNKGFAGLIGPATSGSETPGT

SEQ ID NO: 282 - protein, 30 aa, Artificial Sequence
  Description of Artificial Sequence: Synthetic polypeptide
GSAPASSRLTNEAPAGLTIPATSGSETPGT

SEQ ID NO: 283 - protein, 30 aa, Artificial Sequence
  Description of Artificial Sequence: Synthetic polypeptide
GSAPDQSRGTNAGPEGLTDPATSGSETPGT

SEQ ID NO: 284 - protein, 30 aa, Artificial Sequence
  Description of Artificial Sequence: Synthetic polypeptide
GSAPESSRGTNIGQGGLTGPATSGSETPGT

SEQ ID NO: 285 - protein, 30 aa, Artificial Sequence
  Description of Artificial Sequence: Synthetic polypeptide
GSAPSSSRGTNQDPAGLTIPATSGSETPGT

SEQ ID NO: 286 - protein, 30 aa, Artificial Sequence
  Description of Artificial Sequence: Synthetic polypeptide
GSAPASSRGQNHSPMGLTGPATSGSETPGT

SEQ ID NO: 287 - protein, 30 aa, Artificial Sequence
  Description of Artificial Sequence: Synthetic polypeptide
GSAPAYSRGPNAGPAGLEGRATSGSETPGT

SEQ ID NO: 288 - protein, 30 aa, Artificial Sequence
  Description of Artificial Sequence: Synthetic polypeptide
GSAPASERGNNAGPANLTGFATSGSETPGT

SEQ ID NO: 289 - protein, 30 aa, Artificial Sequence
  Description of Artificial Sequence: Synthetic polypeptide
GSAPASHRGTNPKPAILTGPATSGSETPGT

SEQ ID NO: 290 - protein, 30 aa, Artificial Sequence
  Description of Artificial Sequence: Synthetic polypeptide
GSAPMSSRRTNANPAQLTGPATSGSETPGT

SEQ ID NO: 291 - protein, 30 aa, Artificial Sequence
  Description of Artificial Sequence: Synthetic polypeptide
GSAPGAGRTDNHEPLELGAAATSGSETPGT

SEQ ID NO: 292 - protein, 30 aa, Artificial Sequence
  Description of Artificial Sequence: Synthetic polypeptide
GSAPLAGRSENTAPLELTAGATSGSETPGT

SEQ ID NO: 293 - protein, 30 aa, Artificial Sequence
  Description of Artificial Sequence: Synthetic polypeptide
GSAPLEGRPDNHEPLALVASATSGSETPGT

SEQ ID NO: 294 - protein, 30 aa, Artificial Sequence
  Description of Artificial Sequence: Synthetic polypeptide
GSAPLSGRSDNEEPLALPAGATSGSETPGT

SEQ ID NO: 295 - protein, 30 aa, Artificial Sequence
  Description of Artificial Sequence: Synthetic polypeptide
GSAPEAGRTDNHEPLELSAPATSGSETPGT

SEQ ID NO: 296 - protein, 30 aa, Artificial Sequence
  Description of Artificial Sequence: Synthetic polypeptide
GSAPEGGRSDNHGPLELVSGATSGSETPGT

SEQ ID NO: 297 - protein, 30 aa, Artificial Sequence
  Description of Artificial Sequence: Synthetic polypeptide
GSAPLSGRSDNEAPLELEAGATSGSETPGT

SEQ ID NO: 298 - protein, 30 aa, Artificial Sequence
  Description of Artificial Sequence: Synthetic polypeptide
GSAPLGGRADNHEPPELGAGATSGSETPGT

SEQ ID NO: 299 - protein, 30 aa, Artificial Sequence
  Description of Artificial Sequence: Synthetic polypeptide
GSAPPPSRGTNAEPAGLTGEATSGSETPGT

SEQ ID NO: 300 - protein, 30 aa, Artificial Sequence
  Description of Artificial Sequence: Synthetic polypeptide
GSAPASTRGENAGPAGLEAPATSGSETPGT

SEQ ID NO: 301 - protein, 30 aa, Artificial Sequence
  Description of Artificial Sequence: Synthetic polypeptide
GSAPESSRGTNGAPEGLTGPATSGSETPGT

SEQ ID NO: 302 - protein, 30 aa, Artificial Sequence
  Description of Artificial Sequence: Synthetic polypeptide
GSAPASSRATNESPAGLTGEATSGSETPGT

SEQ ID NO: 303 - protein, 30 aa, Artificial Sequence
  Description of Artificial Sequence: Synthetic polypeptide
GSAPASSRGENPPPGGLTGPATSGSETPGT

SEQ ID NO: 304 - protein, 30 aa, Artificial Sequence
  Description of Artificial Sequence: Synthetic polypeptide
GSAPAASRGTNTGPAELTGSATSGSETPGT

SEQ ID NO: 305 - protein, 30 aa, Artificial Sequence
  Description of Artificial Sequence: Synthetic polypeptide
GSAPAGSRTTNAGPGGLEGPATSGSETPGT

SEQ ID NO: 306 - protein, 30 aa, Artificial Sequence
  Description of Artificial Sequence: Synthetic polypeptide
GSAPAPSRGENAGPATLTGAATSGSETPGT

SEQ ID NO: 307 - protein, 30 aa, Artificial Sequence
  Description of Artificial Sequence: Synthetic polypeptide
GSAPESGRAANTGPPTLTAPATSGSETPGT

SEQ ID NO: 308 - protein, 30 aa, Artificial Sequence
  Description of Artificial Sequence: Synthetic polypeptide
GSAPNPGRAANEGPPGLPGSATSGSETPGT

SEQ ID NO: 309 - protein, 30 aa, Artificial Sequence
  Description of Artificial Sequence: Synthetic polypeptide
GSAPESSRAANLTPPELTGPATSGSETPGT

SEQ ID NO: 310 - protein, 30 aa, Artificial Sequence
  Description of Artificial Sequence: Synthetic polypeptide
GSAPASGRAANETPPGLTGAATSGSETPGT

SEQ ID NO: 311 - protein, 30 aa, Artificial Sequence
  Description of Artificial Sequence: Synthetic polypeptide
GSAPNSGRGENLGAPGLTGTATSGSETPGT

SEQ ID NO: 312 - protein, 30 aa, Artificial Sequence
  Description of Artificial Sequence: Synthetic polypeptide
GSAPTTGRAANLTPAGLTGPATSGSETPGT

SEQ ID NO: 313 - protein, 30 aa, Artificial Sequence
  Description of Artificial Sequence: Synthetic polypeptide
GSAPEAGRSANHTPAGLTGPATSGSETPGT

SEQ ID NO: 314 - protein, 30 aa, Artificial Sequence
  Description of Artificial Sequence: Synthetic polypeptide
GSAPESGRAANTTPAGLTGPATSGSETPGT

SEQ ID NO: 315 - protein, 33 aa, Artificial Sequence
  Description of Artificial Sequence: Synthetic polypeptide
GSAPTTGRATEAANLTPAGLTGPATSGSETPGT

SEQ ID NO: 316 - protein, 33 aa, Artificial Sequence
  Description of Artificial Sequence: Synthetic polypeptide
GSAPTTGRAEEAANLTPAGLTGPATSGSETPGT

SEQ ID NO: 317 - protein, 33 aa, Artificial Sequence
  Description of Artificial Sequence: Synthetic polypeptide
GSAPTTGRAGEAANLTPAGLTGPATSGSETPGT

SEQ ID NO: 318 - protein, 33 aa, Artificial Sequence
  Description of Artificial Sequence: Synthetic polypeptide
GSAPTTGRATEAANATPAGLTGPATSGSETPGT

SEQ ID NO: 319 - protein, 33 aa, Artificial Sequence
  Description of Artificial Sequence: Synthetic polypeptide
GSAPTTGRAGEAEGATSAGATGPATSGSETPGT

SEQ ID NO: 320 - protein, 33 aa, Artificial Sequence
  Description of Artificial Sequence: Synthetic polypeptide
GSAPTTGEAGEAANATSAGATGPATSGSETPGT

SEQ ID NO: 321 - protein, 33 aa, Artificial Sequence
  Description of Artificial Sequence: Synthetic polypeptide
GSAPTTGEAGEAAGLTPAGLTGPATSGSETPGT

SEQ ID NO: 322 - protein, 33 aa, Artificial Sequence
  Description of Artificial Sequence: Synthetic polypeptide
GSAPTTGAAGEAANATPAGLTGPATSGSETPGT

SEQ ID NO: 323 - protein, 33 aa, Artificial Sequence
  Description of Artificial Sequence: Synthetic polypeptide
GSAPTTGRAGEAAGLTPAGLTGPATSGSETPGT

SEQ ID NO: 324 - protein, 33 aa, Artificial Sequence
  Description of Artificial Sequence: Synthetic polypeptide
GSAPTTGRAGEAANATSAGATGPATSGSETPGT

SEQ ID NO: 325 - protein, 33 aa, Artificial Sequence
  Description of Artificial Sequence: Synthetic polypeptide
GSAPTTGEAGEAAGATSAGATGPATSGSETPGT

SEQ ID NO: 326 - protein, 30 aa, Artificial Sequence
  Description of Artificial Sequence: Synthetic polypeptide
GSAPESGRAANTEPPELGAGATSGSETPGT

SEQ ID NO: 327 - protein, 30 aa, Artificial Sequence
  Description of Artificial Sequence: Synthetic polypeptide
GSAPESGRAANTAPEGLTGPATSGSETPGT

SEQ ID NO: 328 - protein, 30 aa, Artificial Sequence
  Description of Artificial Sequence: Synthetic polypeptide
GSAPEPGRAANHEPSGLTEGATSGSETPGT

SEQ ID NO: 329 - protein, 33 aa, Artificial Sequence
  Description of Artificial Sequence: Synthetic polypeptide
GSAPESGRAANHTGAPPGGLTGPATSGSETPGT

SEQ ID NO: 330 - protein, 33 aa, Artificial Sequence
  Description of Artificial Sequence: Synthetic polypeptide
GSAPTTGRTGEGANATPGGLTGPATSGSETPGT

SEQ ID NO: 331 - protein, 33 aa, Artificial Sequence
  Description of Artificial Sequence: Synthetic polypeptide
GSAPRTGRSGEAANETPEGLEGPATSGSETPGT

SEQ ID NO: 332 - protein, 33 aa, Artificial Sequence
  Description of Artificial Sequence: Synthetic polypeptide
GSAPRTGRTGESANETPAGLGGPATSGSETPGT

SEQ ID NO: 333 - protein, 33 aa, Artificial Sequence
  Description of Artificial Sequence: Synthetic polypeptide
GSAPSTGRTGEPANETPAGLSGPATSGSETPGT

SEQ ID NO: 334 - protein, 33 aa, Artificial Sequence
  Description of Artificial Sequence: Synthetic polypeptide
GSAPTTGRAGEPANATPTGLSGPATSGSETPGT

SEQ ID NO: 335 - protein, 33 aa, Artificial Sequence
  Description of Artificial Sequence: Synthetic polypeptide
GSAPRTGRPGEGANATPTGLPGPATSGSETPGT

SEQ ID NO: 336 - protein, 33 aa, Artificial Sequence
  Description of Artificial Sequence: Synthetic polypeptide
GSAPRTGRGGEAANATPSGLGGPATSGSETPGT

SEQ ID NO: 337 - protein, 33 aa, Artificial Sequence
  Description of Artificial Sequence: Synthetic polypeptide
GSAPSTGRSGESANATPGGLGGPATSGSETPGT

SEQ ID NO: 338 - protein, 33 aa, Artificial Sequence
  Description of Artificial Sequence: Synthetic polypeptide
GSAPRTGRTGEEANATPAGLPGPATSGSETPGT

SEQ ID NO: 339 - protein, 33 aa, Artificial Sequence
  Description of Artificial Sequence: Synthetic polypeptide
GSAPATGRPGEPANTTPEGLEGPATSGSETPGT

SEQ ID NO: 340 - protein, 33 aa, Artificial Sequence
  Description of Artificial Sequence: Synthetic polypeptide
GSAPSTGRSGEPANATPGGLTGPATSGSETPGT

SEQ ID NO: 341 - protein, 33 aa, Artificial Sequence
  Description of Artificial Sequence: Synthetic polypeptide
GSAPPTGRGGEGANTTPTGLPGPATSGSETPGT

SEQ ID NO: 342 - protein, 33 aa, Artificial Sequence
  Description of Artificial Sequence: Synthetic polypeptide
GSAPPTGRSGEGANATPSGLTGPATSGSETPGT

SEQ ID NO: 343 - protein, 33 aa, Artificial Sequence
  Description of Artificial Sequence: Synthetic polypeptide
GSAPTTGRASEGANSTPAPLTEPATSGSETPGT

SEQ ID NO: 344 - protein, 33 aa, Artificial Sequence
  Description of Artificial Sequence: Synthetic polypeptide
GSAPTYGRAAEAANTTPAGLTAPATSGSETPGT

SEQ ID NO: 345 - protein, 33 aa, Artificial Sequence
  Description of Artificial Sequence: Synthetic polypeptide
GSAPTTGRATEGANATPAELTEPATSGSETPGT

SEQ ID NO: 346 - protein, 33 aa, Artificial Sequence
  Description of Artificial Sequence: Synthetic polypeptide
GSAPTVGRASEEANTTPASLTGPATSGSETPGT

SEQ ID NO: 347 - protein, 33 aa, Artificial Sequence
  Description of Artificial Sequence: Synthetic polypeptide
GSAPTTGRAPEAANATPAPLTGPATSGSETPGT

SEQ ID NO: 348 - protein, 33 aa, Artificial Sequence
  Description of Artificial Sequence: Synthetic polypeptide
GSAPTWGRATEPANATPAPLTSPATSGSETPGT

SEQ ID NO: 349 - protein, 33 aa, Artificial Sequence
  Description of Artificial Sequence: Synthetic polypeptide
GSAPTVGRASESANATPAELTSPATSGSETPGT

SEQ ID NO: 350 - protein, 33 aa, Artificial Sequence
  Description of Artificial Sequence: Synthetic polypeptide
GSAPTVGRAPEGANSTPAGLTGPATSGSETPGT

SEQ ID NO: 351 - protein, 33 aa, Artificial Sequence
  Description of Artificial Sequence: Synthetic polypeptide
GSAPTWGRATEAPNLEPATLTTPATSGSETPGT

SEQ ID NO: 352 - protein, 33 aa, Artificial Sequence
  Description of Artificial Sequence: Synthetic polypeptide
GSAPTTGRATEAPNLTPAPLTEPATSGSETPGT

SEQ ID NO: 353 - protein, 33 aa, Artificial Sequence
  Description of Artificial Sequence: Synthetic polypeptide
GSAPTQGRATEAPNLSPAALTSPATSGSETPGT

SEQ ID NO: 354 - protein, 33 aa, Artificial Sequence
  Description of Artificial Sequence: Synthetic polypeptide
GSAPTQGRAAEAPNLTPATLTAPATSGSETPGT

SEQ ID NO: 355 - protein, 33 aa, Artificial Sequence
  Description of Artificial Sequence: Synthetic polypeptide
GSAPTSGRAPEATNLAPAPLTGPATSGSETPGT

SEQ ID NO: 356 - protein, 33 aa, Artificial Sequence
  Description of Artificial Sequence: Synthetic polypeptide
GSAPTQGRAAEAANLTPAGLTEPATSGSETPGT

SEQ ID NO: 357 - protein, 33 aa, Artificial Sequence
  Description of Artificial Sequence: Synthetic polypeptide
GSAPTTGRAGSAPNLPPTGLTTPATSGSETPGT

SEQ ID NO: 358 - protein, 33 aa, Artificial Sequence
  Description of Artificial Sequence: Synthetic polypeptide
GSAPTTGRAGGAENLPPEGLTAPATSGSETPGT

SEQ ID NO: 359 - protein, 33 aa, Artificial Sequence
  Description of Artificial Sequence: Synthetic polypeptide
GSAPTTSRAGTATNLTPEGLTAPATSGSETPGT

SEQ ID NO: 360 - protein, 33 aa, Artificial Sequence
  Description of Artificial Sequence: Synthetic polypeptide
GSAPTTGRAGTATNLPPSGLTTPATSGSETPGT

SEQ ID NO: 361 - protein, 33 aa, Artificial Sequence
  Description of Artificial Sequence: Synthetic polypeptide
GSAPTTARAGEAENLSPSGLTAPATSGSETPGT

SEQ ID NO: 362 - protein, 33 aa, Artificial Sequence
  Description of Artificial Sequence: Synthetic polypeptide
GSAPTTGRAGGAGNLAPGGLTEPATSGSETPGT

SEQ ID NO: 363 - protein, 33 aa, Artificial Sequence
  Description of Artificial Sequence: Synthetic polypeptide
GSAPTTGRAGTATNLPPEGLTGPATSGSETPGT

SEQ ID NO: 364 - protein, 33 aa, Artificial Sequence
  Description of Artificial Sequence: Synthetic polypeptide
GSAPTTGRAGGAANLAPTGLTEPATSGSETPGT

SEQ ID NO: 365 - protein, 33 aa, Artificial Sequence
  Description of Artificial Sequence: Synthetic polypeptide
GSAPTTGRAGTAENLAPSGLTTPATSGSETPGT

SEQ ID NO: 366 - protein, 33 aa, Artificial Sequence
  Description of Artificial Sequence: Synthetic polypeptide
GSAPTTGRAGSATNLGPGGLTGPATSGSETPGT

SEQ ID NO: 367 - protein, 33 aa, Artificial Sequence
  Description of Artificial Sequence: Synthetic polypeptide
GSAPTTARAGGAENLTPAGLTEPATSGSETPGT

SEQ ID NO: 368 - protein, 33 aa, Artificial Sequence
  Description of Artificial Sequence: Synthetic polypeptide
GSAPTTARAGSAENLSPSGLTGPATSGSETPGT

SEQ ID NO: 369 - protein, 33 aa, Artificial Sequence
  Description of Artificial Sequence: Synthetic polypeptide
GSAPTTARAGGAGNLAPEGLTTPATSGSETPGT

SEQ ID NO: 370 - protein, 33 aa, Artificial Sequence
  Description of Artificial Sequence: Synthetic polypeptide
GSAPTTSRAGAAENLTPTGLTGPATSGSETPGT

SEQ ID NO: 371 - protein, 33 aa, Artificial Sequence
  Description of Artificial Sequence: Synthetic polypeptide
GSAPTYGRTTTPGNEPPASLEAEATSGSETPGT

SEQ ID NO: 372 - protein, 33 aa, Artificial Sequence
  Description of Artificial Sequence: Synthetic polypeptide
GSAPTYSRGESGPNEPPPGLTGPATSGSETPGT

SEQ ID NO: 373 - protein, 33 aa, Artificial Sequence
  Description of Artificial Sequence: Synthetic polypeptide
GSAPAWGRTGASENETPAPLGGEATSGSETPGT

SEQ ID NO: 374 - protein, 33 aa, Artificial Sequence
  Description of Artificial Sequence: Synthetic polypeptide
GSAPRWGRAETTPNTPPEGLETEATSGSETPGT

SEQ ID NO: 375 - protein, 33 aa, Artificial Sequence
  Description of Artificial Sequence: Synthetic polypeptide
GSAPESGRAANHTGAEPPELGAGATSGSETPGT

SEQ ID NO: 376 - protein, 33 aa, Artificial Sequence
  Description of Artificial Sequence: Synthetic polypeptide
GSAPTTGRAGEAANLTPAGLTESATSGSETPGT

SEQ ID NO: 377 - protein, 33 aa, Artificial Sequence
  Description of Artificial Sequence: Synthetic polypeptide
GSAPTTGRAGEAANLTPAALTESATSGSETPGT

SEQ ID NO: 378 - protein, 33 aa, Artificial Sequence
  Description of Artificial Sequence: Synthetic polypeptide
GSAPTTGRAGEAANLTPAPLTESATSGSETPGT

SEQ ID NO: 379 - protein, 33 aa, Artificial Sequence
  Description of Artificial Sequence: Synthetic polypeptide
GSAPTTGRAGEAANLTPEPLTESATSGSETPGT

SEQ ID NO: 380 - protein, 33 aa, Artificial Sequence
  Description of Artificial Sequence: Synthetic polypeptide
GSAPTTGRAGEAANLTPAGLTGAATSGSETPGT

SEQ ID NO: 381 - protein, 33 aa, Artificial Sequence
  Description of Artificial Sequence: Synthetic polypeptide
GSAPTTGRAGEAANLTPEGLTGAATSGSETPGT

SEQ ID NO: 382 - protein, 33 aa, Artificial Sequence
  Description of Artificial Sequence: Synthetic polypeptide
GSAPTTGRAGEAANLTPEPLTGAATSGSETPGT

SEQ ID NO: 383 - protein, 33 aa, Artificial Sequence
  Description of Artificial Sequence: Synthetic polypeptide
GSAPTTGRAGEAANLTPAGLTEAATSGSETPGT

SEQ ID NO: 384 - protein, 33 aa, Artificial Sequence
  Description of Artificial Sequence: Synthetic polypeptide
GSAPTTGRAGEAANLTPEGLTEAATSGSETPGT

SEQ ID NO: 385 - protein, 33 aa, Artificial Sequence
  Description of Artificial Sequence: Synthetic polypeptide
GSAPTTGRAGEAANLTPAPLTEAATSGSETPGT

SEQ ID NO: 386 - protein, 33 aa, Artificial Sequence
  Description of Artificial Sequence: Synthetic polypeptide
GSAPTTGRAGEAANLTPEPLTEAATSGSETPGT

SEQ ID NO: 387 - protein, 33 aa, Artificial Sequence
  Description of Artificial Sequence: Synthetic polypeptide
GSAPTTGRAGEAANLTPEPLTGPATSGSETPGT

SEQ ID NO: 388 - protein, 33 aa, Artificial Sequence
  Description of Artificial Sequence: Synthetic polypeptide
GSAPTTGRAGEAANLTPAGLTGGATSGSETPGT

SEQ ID NO: 389 - protein, 33 aa, Artificial Sequence
  Description of Artificial Sequence: Synthetic polypeptide
GSAPTTGRAGEAANLTPEGLTGGATSGSETPGT

SEQ ID NO: 390 - protein, 33 aa, Artificial Sequence
  Description of Artificial Sequence: Synthetic polypeptide
GSAPTTGRAGEAANLTPEALTGGATSGSETPGT

SEQ ID NO: 391 - protein, 33 aa, Artificial Sequence
  Description of Artificial Sequence: Synthetic polypeptide
GSAPTTGRAGEAANLTPEPLTGGATSGSETPGT

SEQ ID NO: 392 - protein, 33 aa, Artificial Sequence
  Description of Artificial Sequence: Synthetic polypeptide
GSAPTTGRAGEAANLTPAGLTEGATSGSETPGT

SEQ ID NO: 393 - protein, 33 aa, Artificial Sequence
  Description of Artificial Sequence: Synthetic polypeptide
GSAPTTGRAGEAANLTPEGLTEGATSGSETPGT

SEQ ID NO: 394 - protein, 33 aa, Artificial Sequence
  Description of Artificial Sequence: Synthetic polypeptide
GSAPTTGRAGEAANLTPAPLTEGATSGSETPGT

SEQ ID NO: 395 - protein, 33 aa, Artificial Sequence
  Description of Artificial Sequence: Synthetic polypeptide
GSAPTTGRAGEAANLTPEPLTEGATSGSETPGT

SEQ ID NO: 396 - protein, 30 aa, Artificial Sequence
  Description of Artificial Sequence: Synthetic polypeptide
GSAPEAGRSAEATSAGATGPATSGSETPGT

SEQ ID NO: 397 - protein, 30 aa, Artificial Sequence
  Description of Artificial Sequence: Synthetic polypeptide
GSAPSASGTYSRGESGPGSPATSGSETPGT

SEQ ID NO: 398 - protein, 30 aa, Artificial Sequence
  Description of Artificial Sequence: Synthetic polypeptide
GSAPSASGEAGRTDTHPGSPATSGSETPGT

SEQ ID NO: 399 - protein, 30 aa, Artificial Sequence
  Description of Artificial Sequence: Synthetic polypeptide
GSAPSASGEPGRAAEHPGSPATSGSETPGT

SEQ ID NO: 400 - protein, 30 aa, Artificial Sequence
  Description of Artificial Sequence: Synthetic polypeptide
GSAPSPAGESSRGTTIAGSPATSGSETPGT

SEQ ID NO: 401 - protein, 30 aa, Artificial Sequence
  Description of Artificial Sequence: Synthetic polypeptide
GSAPEAGESAGATPAGLTGPATSGSETPGT

SEQ ID NO: 402 - protein, 30 aa, Artificial Sequence
  Description of Artificial Sequence: Synthetic polypeptide
GSAPSASGAPLELEAGPGSPATSGSETPGT

SEQ ID NO: 403 - protein, 30 aa, Artificial Sequence
  Description of Artificial Sequence: Synthetic polypeptide
GSAPSASGEPPELGAGPGSPATSGSETPGT

SEQ ID NO: 404 - protein, 30 aa, Artificial Sequence
  Description of Artificial Sequence: Synthetic polypeptide
GSAPSASGEPSGLTEGPGSPATSGSETPGT

SEQ ID NO: 405 - protein, 30 aa, Artificial Sequence
  Description of Artificial Sequence: Synthetic polypeptide
GSAPSASGTPAPLTEPPGSPATSGSETPGT

SEQ ID NO: 406 - protein, 30 aa, Artificial Sequence
  Description of Artificial Sequence: Synthetic polypeptide
GSAPSASGTPAELTEPPGSPATSGSETPGT

SEQ ID NO: 407 - protein, 30 aa, Artificial Sequence
  Description of Artificial Sequence: Synthetic polypeptide
GSAPSASGPPPGLTGPPGSPATSGSETPGT

SEQ ID NO: 408 - protein, 30 aa, Artificial Sequence
  Description of Artificial Sequence: Synthetic polypeptide
GSAPSASGTPAPLGGEPGSPATSGSETPGT

SEQ ID NO: 409 - protein, 30 aa, Artificial Sequence
  Description of Artificial Sequence: Synthetic polypeptide
GSAPSPAGAPEGLTGPAGSPATSGSETPGT

SEQ ID NO: 410 - protein, 30 aa, Artificial Sequence
  Description of Artificial Sequence: Synthetic polypeptide
GSAPSPAGPPEGLETEAGSPATSGSETPGT

SEQ ID NO: 411 - protein, 30 aa, Artificial Sequence
  Description of Artificial Sequence: Synthetic polypeptide
GSAPSPTSGQGGLTGPGSEPATSGSETPGT

SEQ ID NO: 412 - protein, 30 aa, Artificial Sequence
  Description of Artificial Sequence: Synthetic polypeptide
GSAPSESAPPEGLETESTEPATSGSETPGT

SEQ ID NO: 413 - protein, 30 aa, Artificial Sequence
  Description of Artificial Sequence: Synthetic polypeptide
GSAPSEGSEPLELGAASETPATSGSETPGT

SEQ ID NO: 414 - protein, 30 aa, Artificial Sequence
  Description of Artificial Sequence: Synthetic polypeptide
GSAPSEGSGPAGLEAPSETPATSGSETPGT

SEQ ID NO: 415 - protein, 30 aa, Artificial Sequence
  Description of Artificial Sequence: Synthetic polypeptide
GSAPSEPTPPASLEAEPGSPATSGSETPGT

SEQ ID NO: 416 - protein, 29 aa, Artificial Sequence
  Description of Artificial Sequence: Synthetic peptide
GTAEAASASGGSAGGYAELRMGGAIPGSP

SEQ ID NO: 417 - protein, 29 aa, Artificial Sequence
  Description of Artificial Sequence: Synthetic peptide
GTAEAASASGGTGGGYAPLRMGGGAPGSP

SEQ ID NO: 418 - protein, 29 aa, Artificial Sequence
  Description of Artificial Sequence: Synthetic peptide
GTAEAASASGGAEGGYAALRMGGEIPGSP

SEQ ID NO: 419 - protein, 29 aa, Artificial Sequence
  Description of Artificial Sequence: Synthetic peptide
GTAEAASASGGGPGGYALLRMGGPAPGSP

SEQ ID NO: 420 - protein, 29 aa, Artificial Sequence
  Description of Artificial Sequence: Synthetic peptide
GTAEAASASGGEAGGYAFLRMGGSIPGSP

SEQ ID NO: 421 - protein, 29 aa, Artificial Sequence
  Description of Artificial Sequence: Synthetic peptide
GTAEAASASGGPGGGYASLRMGGTAPGSP

SEQ ID NO: 422 - protein, 29 aa, Artificial Sequence
  Description of Artificial Sequence: Synthetic peptide
GTAEAASASGGSEGGYATLRMGGAIPGSP

SEQ ID NO: 423 - protein, 29 aa, Artificial Sequence
  Description of Artificial Sequence: Synthetic peptide
GTAEAASASGGTPGGYANLRMGGGAPGSP

SEQ ID NO: 424 - protein, 29 aa, Artificial Sequence
  Description of Artificial Sequence: Synthetic peptide
GTAEAASASGGASGGYAHLRMGGEIPGSP

SEQ ID NO: 425 - protein, 29 aa, Artificial Sequence
  Description of Artificial Sequence: Synthetic peptide
GTAEAASASGGGTGGYGELRMGGPAPGSP

SEQ ID NO: 426 - protein, 29 aa, Artificial Sequence
  Description of Artificial Sequence: Synthetic peptide
GTAEAASASGGEAGGYPELRMGGSIPGSP

SEQ ID NO: 427 - protein, 29 aa, Artificial Sequence
  Description of Artificial Sequence: Synthetic peptide
GTAEAASASGGPGGGYVELRMGGTAPGSP

SEQ ID NO: 428 - protein, 29 aa, Artificial Sequence
  Description of Artificial Sequence: Synthetic peptide
GTAEAASASGGSEGGYLELRMGGAIPGSP

SEQ ID NO: 429 - protein, 29 aa, Artificial Sequence
  Description of Artificial Sequence: Synthetic peptide
GTAEAASASGGTPGGYSELRMGGGAPGSP

SEQ ID NO: 430 - protein, 29 aa, Artificial Sequence
  Description of Artificial Sequence: Synthetic peptide
GTAEAASASGGASGGYTELRMGGEIPGSP

SEQ ID NO: 431 - protein, 29 aa, Artificial Sequence
  Description of Artificial Sequence: Synthetic peptide
GTAEAASASGGGTGGYQELRMGGPAPGSP

SEQ ID NO: 432 - protein, 29 aa, Artificial Sequence
  Description of Artificial Sequence: Synthetic peptide
GTAEAASASGGEAGGYEELRMGGSIPGSP

SEQ ID NO: 433 - protein, 29 aa, Artificial Sequence
  Description of Artificial Sequence: Synthetic peptide
GTAEAASASGGPGIGPAELRMGGTAPGSP

SEQ ID NO: 434 - protein, 29 aa, Artificial Sequence
  Description of Artificial Sequence: Synthetic peptide
GTAEAASASGGSEIGAAELRMGGAIPGSP

SEQ ID NO: 435 - protein, 29 aa, Artificial Sequence
  Description of Artificial Sequence: Synthetic peptide
GTAEAASASGGTPIGSAELRMGGGAPGSP

SEQ ID NO: 436 - protein, 29 aa, Artificial Sequence
  Description of Artificial Sequence: Synthetic peptide
GTAEAASASGGASIGTAELRMGGEIPGSP

SEQ ID NO: 437 - protein, 29 aa, Artificial Sequence
  Description of Artificial Sequence: Synthetic peptide
GTAEAASASGGGTIGNAELRMGGPAPGSP

SEQ ID NO: 438 - protein, 29 aa, Artificial Sequence
  Description of Artificial Sequence: Synthetic peptide
GTAEAASASGGEAIGQAELRMGGSIPGSP

SEQ ID NO: 439 - protein, 29 aa, Artificial Sequence
  Description of Artificial Sequence: Synthetic peptide
GTAEAASASGGPGGPYAELRMGGTAPGSP

SEQ ID NO: 440 - protein, 29 aa, Artificial Sequence
  Description of Artificial Sequence: Synthetic peptide
GTAEAASASGGSEGAYAELRMGGAIPGSP

SEQ ID NO: 441 - protein, 29 aa, Artificial Sequence
  Description of Artificial Sequence: Synthetic peptide
GTAEAASASGGTPGVYAELRMGGGAPGSP

SEQ ID NO: 442 - protein, 29 aa, Artificial Sequence
  Description of Artificial Sequence: Synthetic peptide
GTAEAASASGGASGLYAELRMGGEIPGSP

SEQ ID NO: 443 - protein, 29 aa, Artificial Sequence
  Description of Artificial Sequence: Synthetic peptide
GTAEAASASGGGTGIYAELRMGGPAPGSP

SEQ ID NO: 444 - protein, 29 aa, Artificial Sequence
  Description of Artificial Sequence: Synthetic peptide
GTAEAASASGGEAGFYAELRMGGSIPGSP

SEQ ID NO: 445 - protein, 29 aa, Artificial Sequence
  Description of Artificial Sequence: Synthetic peptide
GTAEAASASGGPGGYYAELRMGGTAPGSP

SEQ ID NO: 446 - protein, 29 aa, Artificial Sequence
  Description of Artificial Sequence: Synthetic peptide
GTAEAASASGGSEGSYAELRMGGAIPGSP

SEQ ID NO: 447 - protein, 29 aa, Artificial Sequence
  Description of Artificial Sequence: Synthetic peptide
GTAEAASASGGTPGNYAELRMGGGAPGSP

SEQ ID NO: 448 - protein, 29 aa, Artificial Sequence
  Description of Artificial Sequence: Synthetic peptide
GTAEAASASGGASGEYAELRMGGEIPGSP

SEQ ID NO: 449 - protein, 29 aa, Artificial Sequence
  Description of Artificial Sequence: Synthetic peptide
GTAEAASASGGGTGHYAELRMGGPAPGSP

SEQ ID NO: 450 - protein, 29 aa, Artificial Sequence
  Description of Artificial Sequence: Synthetic peptide
GTAEAASASGGEAGGYAEARMGGSIPGSP

SEQ ID NO: 451 - protein, 29 aa, Artificial Sequence
  Description of Artificial Sequence: Synthetic peptide
GTAEAASASGGPGGGYAEVRMGGTAPGSP

SEQ ID NO: 452 - protein, 29 aa, Artificial Sequence
  Description of Artificial Sequence: Synthetic peptide
GTAEAASASGGSEGGYAEIRMGGAIPGSP

SEQ ID NO: 453 - protein, 29 aa, Artificial Sequence
  Description of Artificial Sequence: Synthetic peptide
GTAEAASASGGTPGGYAEFRMGGGAPGSP

SEQ ID NO: 454 - protein, 29 aa, Artificial Sequence
  Description of Artificial Sequence: Synthetic peptide
GTAEAASASGGASGGYAEYRMGGEIPGSP

SEQ ID NO: 455 - protein, 29 aa, Artificial Sequence
  Description of Artificial Sequence: Synthetic peptide
GTAEAASASGGGTGGYAESRMGGPAPGSP

SEQ ID NO: 456 - protein, 29 aa, Artificial Sequence
  Description of Artificial Sequence: Synthetic peptide
GTAEAASASGGEAGGYAETRMGGSIPGSP

SEQ ID NO: 457 - protein, 29 aa, Artificial Sequence
  Description of Artificial Sequence: Synthetic peptide
GTAEAASASGGPGGGYAELAMGGTRPGSP

SEQ ID NO: 458 - protein, 29 aa, Artificial Sequence
  Description of Artificial Sequence: Synthetic peptide
GTAEAASASGGSEGGYAELVMGGARPGSP

SEQ ID NO: 459 - protein, 29 aa, Artificial Sequence
  Description of Artificial Sequence: Synthetic peptide
GTAEAASASGGTPGGYAELLMGGGRPGSP

SEQ ID NO: 460 - protein, 29 aa, Artificial Sequence
  Description of Artificial Sequence: Synthetic peptide
GTAEAASASGGASGGYAELIMGGERPGSP

SEQ ID NO: 461 - protein, 29 aa, Artificial Sequence
  Description of Artificial Sequence: Synthetic peptide
GTAEAASASGGGTGGYAELWMGGPRPGSP

SEQ ID NO: 462 - protein, 29 aa, Artificial Sequence
  Description of Artificial Sequence: Synthetic peptide
GTAEAASASGGEAGGYAELSMGGSRPGSP

SEQ ID NO: 463 - protein, 29 aa, Artificial Sequence
  Description of Artificial Sequence: Synthetic peptide
GTAEAASASGGPGGGYAELTMGGTRPGSP

SEQ ID NO: 464 - protein, 29 aa, Artificial Sequence
  Description of Artificial Sequence: Synthetic peptide
GTAEAASASGGSEGGYAELQMGGARPGSP

SEQ ID NO: 465 - protein, 29 aa, Artificial Sequence
  Description of Artificial Sequence: Synthetic peptide
GTAEAASASGGTPGGYAELNMGGGRPGSP

SEQ ID NO: 466 - protein, 29 aa, Artificial Sequence
  Description of Artificial Sequence: Synthetic peptide
GTAEAASASGGASGGYAELEMGGERPGSP

SEQ ID NO: 467 - protein, 29 aa, Artificial Sequence
  Description of Artificial Sequence: Synthetic peptide
GTAEAASASGGGTGGYAELRPGGPIPGSP

SEQ ID NO: 468 - protein, 29 aa, Artificial Sequence
  Description of Artificial Sequence: Synthetic peptide
GTAEAASASGGEAGGYAELRAGGSAPGSP

SEQ ID NO: 469 - protein, 29 aa, Artificial Sequence
  Description of Artificial Sequence: Synthetic peptide
GTAEAASASGGPGGGYAELRLGGTIPGSP

SEQ ID NO: 470 - protein, 29 aa, Artificial Sequence
  Description of Artificial Sequence: Synthetic peptide
GTAEAASASGGSEGGYAELRIGGAAPGSP

SEQ ID NO: 471 - protein, 29 aa, Artificial Sequence
  Description of Artificial Sequence: Synthetic peptide
GTAEAASASGGTPGGYAELRSGGGIPGSP

SEQ ID NO: 472 - protein, 29 aa, Artificial Sequence
  Description of Artificial Sequence: Synthetic peptide
GTAEAASASGGASGGYAELRNGGEAPGSP

SEQ ID NO: 473 - protein, 29 aa, Artificial Sequence
  Description of Artificial Sequence: Synthetic peptide
GTAEAASASGGGTGGYAELRQGGPIPGSP

SEQ ID NO: 474 - protein, 29 aa, Artificial Sequence
  Description of Artificial Sequence: Synthetic peptide
GTAEAASASGGEAGGYAELRDGGSAPGSP

SEQ ID NO: 475 - protein, 29 aa, Artificial Sequence
  Description of Artificial Sequence: Synthetic peptide
GTAEAASASGGPGGGYAELREGGTIPGSP

SEQ ID NO: 476 - protein, 29 aa, Artificial Sequence
  Description of Artificial Sequence: Synthetic peptide
GTAEAASASGGSEGGYAELRHGGAAPGSP

SEQ ID NO: 477 - protein, 29 aa, Artificial Sequence
  Description of Artificial Sequence: Synthetic peptide
GTAEAASASGGTPGGYAELRMPGGIPGSP

SEQ ID NO: 478 - protein, 29 aa, Artificial Sequence
  Description of Artificial Sequence: Synthetic peptide
GTAEAASASGGASGGYAELRMAGEAPGSP

SEQ ID NO: 479 - protein, 29 aa, Artificial Sequence
  Description of Artificial Sequence: Synthetic peptide
GTAEAASASGGGTGGYAELRMVGPIPGSP

SEQ ID NO: 480 - protein, 29 aa, Artificial Sequence
  Description of Artificial Sequence: Synthetic peptide
GTAEAASASGGEAGGYAELRMLGSAPGSP

SEQ ID NO: 481 - protein, 29 aa, Artificial Sequence
  Description of Artificial Sequence: Synthetic peptide
GTAEAASASGGPGGGYAELRMIGTIPGSP

SEQ ID NO: 482 - protein, 29 aa, Artificial Sequence
  Description of Artificial Sequence: Synthetic peptide
GTAEAASASGGSEGGYAELRMYGAIPGSP

SEQ ID NO: 483 - protein, 29 aa, Artificial Sequence
  Description of Artificial Sequence: Synthetic peptide
GTAEAASASGGTPGGYAELRMSGGAPGSP

SEQ ID NO: 484 - protein, 29 aa, Artificial Sequence
  Description of Artificial Sequence: Synthetic peptide
GTAEAASASGGASGGYAELRMNGEIPGSP

SEQ ID NO: 485 - protein, 29 aa, Artificial Sequence
  Description of Artificial Sequence: Synthetic peptide
GTAEAASASGGGTGGYAELRMQGPAPGSP

SEQ ID NO: 486 - protein, 29 aa, Artificial Sequence
  Description of Artificial Sequence: Synthetic peptide
GTAEAASASGGANHTPAGLTGPGARPGSP

SEQ ID NO: 487 - protein, 29 aa, Artificial Sequence
  Description of Artificial Sequence: Synthetic peptide
GTAEAASASGGANTAPEGLTGPSTRPGSP

SEQ ID NO: 488 - protein, 29 aa, Artificial Sequence
  Description of Artificial Sequence: Synthetic peptide
GTAEAASASGGTGAPPGGLTGPGTRPGSP

SEQ ID NO: 489 - protein, 29 aa, Artificial Sequence
  Description of Artificial Sequence: Synthetic peptide
GTAEAASASGGANHEPSGLTEGSPRPGSP

SEQ ID NO: 490 - protein, 29 aa, Artificial Sequence
  Description of Artificial Sequence: Synthetic peptide
GTAEAASASGGANTEPPELGAGTERPGSP

SEQ ID NO: 491 - protein, 29 aa, Artificial Sequence
  Description of Artificial Sequence: Synthetic peptide
GTAEAASASGGASGPPPGLTGPPGRPGSP

SEQ ID NO: 492 - protein, 29 aa, Artificial Sequence
  Description of Artificial Sequence: Synthetic peptide
GTAEAASASGGASGTPAPLGGEPGRPGSP

SEQ ID NO: 493 - protein, 29 aa, Artificial Sequence
  Description of Artificial Sequence: Synthetic peptide
GTAEAASASGGPAGPPEGLETEAGRPGSP

SEQ ID NO: 494 - protein, 29 aa, Artificial Sequence
  Description of Artificial Sequence: Synthetic peptide
GTAEAASASGGPTSGQGGLTGPESRPGSP

SEQ ID NO: 495 - protein, 29 aa, Artificial Sequence
  Description of Artificial Sequence: Synthetic peptide
GTAEAASASGGSAGGAANLVRGGAIPGSP

SEQ ID NO: 496 - protein, 29 aa, Artificial Sequence
  Description of Artificial Sequence: Synthetic peptide
GTAEAASASGGTGGGAAPLVRGGGAPGSP

SEQ ID NO: 497 - protein, 29 aa, Artificial Sequence
  Description of Artificial Sequence: Synthetic peptide
GTAEAASASGGAEGGAAALVRGGEIPGSP

SEQ ID NO: 498 - protein, 29 aa, Artificial Sequence
  Description of Artificial Sequence: Synthetic peptide
GTAEAASASGGGPGGAALLVRGGPAPGSP

SEQ ID NO: 499 - protein, 29 aa, Artificial Sequence
  Description of Artificial Sequence: Synthetic peptide
GTAEAASASGGEAGGAAFLVRGGSIPGSP

SEQ ID NO: 500 - protein, 29 aa, Artificial Sequence
  Description of Artificial Sequence: Synthetic peptide
GTAEAASASGGPGGGAASLVRGGTAPGSP

SEQ ID NO: 501 - protein, 29 aa, Artificial Sequence
  Description of Artificial Sequence: Synthetic peptide
GTAEAASASGGSEGGAATLVRGGAIPGSP

SEQ ID NO: 502 - protein, 29 aa, Artificial Sequence
  Description of Artificial Sequence: Synthetic peptide
GTAEAASASGGTPGGAAGLVRGGGAPGSP

SEQ ID NO: 503 - protein, 29 aa, Artificial Sequence
  Description of Artificial Sequence: Synthetic peptide
GTAEAASASGGASGGAADLVRGGEIPGSP

SEQ ID NO: 504 - protein, 29 aa, Artificial Sequence
  Description of Artificial Sequence: Synthetic peptide
GTAEAASASGGGTGGAGNLVRGGPAPGSP

SEQ ID NO: 505 - protein, 29 aa, Artificial Sequence
  Description of Artificial Sequence: Synthetic peptide
GTAEAASASGGEAGGAPNLVRGGSIPGSP

SEQ ID NO: 506 - protein, 29 aa, Artificial Sequence
  Description of Artificial Sequence: Synthetic peptide
GTAEAASASGGPGGGAVNLVRGGTAPGSP

SEQ ID NO: 507 - protein, 29 aa, Artificial Sequence
  Description of Artificial Sequence: Synthetic peptide
GTAEAASASGGSEGGALNLVRGGAIPGSP

SEQ ID NO: 508 - protein, 29 aa, Artificial Sequence
  Description of Artificial Sequence: Synthetic peptide
GTAEAASASGGTPGGASNLVRGGGAPGSP

SEQ ID NO: 509 - protein, 29 aa, Artificial Sequence
  Description of Artificial Sequence: Synthetic peptide
GTAEAASASGGASGGATNLVRGGEIPGSP

SEQ ID NO: 510 - protein, 29 aa, Artificial Sequence
  Description of Artificial Sequence: Synthetic peptide
GTAEAASASGGGTGGAQNLVRGGPAPGSP

SEQ ID NO: 511 - protein, 29 aa, Artificial Sequence
  Description of Artificial Sequence: Synthetic peptide
GTAEAASASGGEAGGAENLVRGGSIPGSP

SEQ ID NO: 512 - protein, 30 aa, Artificial Sequence
  Description of Artificial Sequence: Synthetic polypeptide
GTAEAASASGEAGRSANHEPLGLVATPGSP

SEQ ID NO: 513 - protein, 30 aa, Artificial Sequence
  Description of Artificial Sequence: Synthetic polypeptide
GTAEAASASGASGRSTNAGPSGLAGPPGSP

SEQ ID NO: 514 - protein, 30 aa, Artificial Sequence
  Description of Artificial Sequence: Synthetic polypeptide
GTAEAASASGASGRSTNAGPQGLAGQPGSP

SEQ ID NO: 515 - protein, 30 aa, Artificial Sequence
  Description of Artificial Sequence: Synthetic polypeptide
GTAEAASASGASGRSTNAGPPGLTGPPGSP

SEQ ID NO: 516 - protein, 30 aa, Artificial Sequence
  Description of Artificial Sequence: Synthetic polypeptide
GTAEAASASGASSRGTNAGPAGLTGPPGSP

SEQ ID NO: 517 - protein, 30 aa, Artificial Sequence
  Description of Artificial Sequence: Synthetic polypeptide
GTAEAASASGASSRTTNTGPSTLTGPPGSP

SEQ ID NO: 518 - protein, 30 aa, Artificial Sequence
  Description of Artificial Sequence: Synthetic polypeptide
GTAEAASASGAAGRSDNGTPLELVAPPGSP

SEQ ID NO: 519 - protein, 30 aa, Artificial Sequence
  Description of Artificial Sequence: Synthetic polypeptide
GTAEAASASGASGRGTNAGPAGLTGPPGSP

SEQ ID NO: 520 - protein, 30 aa, Artificial Sequence
  Description of Artificial Sequence: Synthetic polypeptide
GTAEAASASGLFGRNDNHEPLELGGGPGSP

SEQ ID NO: 521 - protein, 30 aa, Artificial Sequence
  Description of Artificial Sequence: Synthetic polypeptide
GTAEAASASGTAGRSDNLEPLGLVFGPGSP

SEQ ID NO: 522 - protein, 30 aa, Artificial Sequence
  Description of Artificial Sequence: Synthetic polypeptide
GTAEAASASGLDGRSDNFHPPELVAGPGSP

SEQ ID NO: 523 - protein, 30 aa, Artificial Sequence
  Description of Artificial Sequence: Synthetic polypeptide
GTAEAASASGLEGRSDNEEPENLVAGPGSP

SEQ ID NO: 524 - protein, 30 aa, Artificial Sequence
  Description of Artificial Sequence: Synthetic polypeptide
GTAEAASASGLKGRSDNNAPLALVAGPGSP

SEQ ID NO: 525 - protein, 30 aa, Artificial Sequence
  Description of Artificial Sequence: Synthetic polypeptide
GTAEAASASGVYSRGTNAGPHGLTGRPGSP

SEQ ID NO: 526 - protein, 30 aa, Artificial Sequence
  Description of Artificial Sequence: Synthetic polypeptide
GTAEAASASGANSRGTNKGFAGLIGPPGSP

SEQ ID NO: 527 - protein, 30 aa, Artificial Sequence
  Description of Artificial Sequence: Synthetic polypeptide
GTAEAASASGASSRLTNEAPAGLTIPPGSP

SEQ ID NO: 528 - protein, 30 aa, Artificial Sequence
  Description of Artificial Sequence: Synthetic polypeptide
GTAEAASASGDQSRGTNAGPEGLTDPPGSP

SEQ ID NO: 529 - protein, 30 aa, Artificial Sequence
  Description of Artificial Sequence: Synthetic polypeptide
GTAEAASASGESSRGTNIGQGGLTGPPGSP

SEQ ID NO: 530 - protein, 30 aa, Artificial Sequence
  Description of Artificial Sequence: Synthetic polypeptide
GTAEAASASGSSSRGTNQDPAGLTIPPGSP

SEQ ID NO: 531 - protein, 30 aa, Artificial Sequence
  Description of Artificial Sequence: Synthetic polypeptide
GTAEAASASGASSRGQNHSPMGLTGPPGSP

SEQ ID NO: 532 - protein, 30 aa, Artificial Sequence
  Description of Artificial Sequence: Synthetic polypeptide
GTAEAASASGAYSRGPNAGPAGLEGRPGSP

SEQ ID NO: 533 - protein, 30 aa, Artificial Sequence
  Description of Artificial Sequence: Synthetic polypeptide
GTAEAASASGASERGNNAGPANLTGFPGSP

SEQ ID NO: 534 - protein, 30 aa, Artificial Sequence
  Description of Artificial Sequence: Synthetic polypeptide
GTAEAASASGASHRGTNPKPAILTGPPGSP

SEQ ID NO: 535 - protein, 30 aa, Artificial Sequence
  Description of Artificial Sequence: Synthetic polypeptide
GTAEAASASGMSSRRTNANPAQLTGPPGSP

SEQ ID NO: 536 - protein, 30 aa, Artificial Sequence
  Description of Artificial Sequence: Synthetic polypeptide
GTAEAASASGGAGRTDNHEPLELGAAPGSP

SEQ ID NO: 537 - protein, 30 aa, Artificial Sequence
  Description of Artificial Sequence: Synthetic polypeptide
GTAEAASASGLAGRSENTAPLELTAGPGSP

SEQ ID NO: 538 - protein, 30 aa, Artificial Sequence
  Description of Artificial Sequence: Synthetic polypeptide
GTAEAASASGLEGRPDNHEPLALVASPGSP

SEQ ID NO: 539 - protein, 30 aa, Artificial Sequence
  Description of Artificial Sequence: Synthetic polypeptide
GTAEAASASGLSGRSDNEEPLALPAGPGSP

SEQ ID NO: 540 - protein, 30 aa, Artificial Sequence
  Description of Artificial Sequence: Synthetic polypeptide
GTAEAASASGEAGRTDNHEPLELSAPPGSP

SEQ ID NO: 541 - protein, 30 aa, Artificial Sequence
  Description of Artificial Sequence: Synthetic polypeptide
GTAEAASASGEGGRSDNHGPLELVSGPGSP

SEQ ID NO: 542 - protein, 30 aa, Artificial Sequence
  Description of Artificial Sequence: Synthetic polypeptide
GTAEAASASGLSGRSDNEAPLELEAGPGSP

SEQ ID NO: 543 - protein, 30 aa, Artificial Sequence
  Description of Artificial Sequence: Synthetic polypeptide
GTAEAASASGLGGRADNHEPPELGAGPGSP

SEQ ID NO: 544 - protein, 30 aa, Artificial Sequence
  Description of Artificial Sequence: Synthetic polypeptide
GTAEAASASGPPSRGTNAEPAGLTGEPGSP

SEQ ID NO: 545 - protein, 30 aa, Artificial Sequence
  Description of Artificial Sequence: Synthetic polypeptide
GTAEAASASGASTRGENAGPAGLEAPPGSP

SEQ ID NO: 546 - protein, 30 aa, Artificial Sequence
  Description of Artificial Sequence: Synthetic polypeptide
GTAEAASASGESSRGTNGAPEGLTGPPGSP

SEQ ID NO: 547 - protein, 30 aa, Artificial Sequence
  Description of Artificial Sequence: Synthetic polypeptide
GTAEAASASGASSRATNESPAGLTGEPGSP

SEQ ID NO: 548 - protein, 30 aa, Artificial Sequence
  Description of Artificial Sequence: Synthetic polypeptide
GTAEAASASGASSRGENPPPGGLTGPPGSP

SEQ ID NO: 549 - protein, 30 aa, Artificial Sequence
  Description of Artificial Sequence: Synthetic polypeptide
GTAEAASASGAASRGTNTGPAELTGSPGSP

SEQ ID NO: 550 - protein, 30 aa, Artificial Sequence
  Description of Artificial Sequence: Synthetic polypeptide
GTAEAASASGAGSRTTNAGPGGLEGPPGSP

SEQ ID NO: 551 - protein, 30 aa, Artificial Sequence
  Description of Artificial Sequence: Synthetic polypeptide
GTAEAASASGAPSRGENAGPATLTGAPGSP

SEQ ID NO: 552 - protein, 30 aa, Artificial Sequence
  Description of Artificial Sequence: Synthetic polypeptide
GTAEAASASGESGRAANTGPPTLTAPPGSP

SEQ ID NO: 553 - protein, 30 aa, Artificial Sequence
  Description of Artificial Sequence: Synthetic polypeptide
GTAEAASASGNPGRAANEGPPGLPGSPGSP

SEQ ID NO: 554 - protein, 30 aa, Artificial Sequence
  Description of Artificial Sequence: Synthetic polypeptide
GTAEAASASGESSRAANLTPPELTGPPGSP

SEQ ID NO: 555 - protein, 30 aa, Artificial Sequence
  Description of Artificial Sequence: Synthetic polypeptide
GTAEAASASGASGRAANETPPGLTGAPGSP

SEQ ID NO: 556 - protein, 30 aa, Artificial Sequence
  Description of Artificial Sequence: Synthetic polypeptide
GTAEAASASGNSGRGENLGAPGLTGTPGSP

SEQ ID NO: 557 - protein, 30 aa, Artificial Sequence
  Description of Artificial Sequence: Synthetic polypeptide
GTAEAASASGTTGRAANLTPAGLTGPPGSP

SEQ ID NO: 558 - protein, 30 aa, Artificial Sequence
  Description of Artificial Sequence: Synthetic polypeptide
GTAEAASASGEAGRSANHTPAGLTGPPGSP

SEQ ID NO: 559 - protein, 30 aa, Artificial Sequence
  Description of Artificial Sequence: Synthetic polypeptide
GTAEAASASGESGRAANTTPAGLTGPPGSP

SEQ ID NO: 560 - protein, 33 aa, Artificial Sequence
  Description of Artificial Sequence: Synthetic polypeptide
GTAEAASASGTTGRATEAANLTPAGLTGPPGSP

SEQ ID NO: 561 - protein, 33 aa, Artificial Sequence
  Description of Artificial Sequence: Synthetic polypeptide
GTAEAASASGTTGRAEEAANLTPAGLTGPPGSP

SEQ ID NO: 562 - protein, 33 aa, Artificial Sequence
  Description of Artificial Sequence: Synthetic polypeptide
GTAEAASASGTTGRAGEAANLTPAGLTGPPGSP

SEQ ID NO: 563 - protein, 33 aa, Artificial Sequence
  Description of Artificial Sequence: Synthetic polypeptide
GTAEAASASGTTGRATEAANATPAGLTGPPGSP

SEQ ID NO: 564 - protein, 33 aa, Artificial Sequence
  Description of Artificial Sequence: Synthetic polypeptide
GTAEAASASGTTGRAGEAEGATSAGATGPPGSP

SEQ ID NO: 565 - protein, 33 aa, Artificial Sequence
  Description of Artificial Sequence: Synthetic polypeptide
GTAEAASASGTTGEAGEAANATSAGATGPPGSP

SEQ ID NO: 566 - protein, 33 aa, Artificial Sequence
  Description of Artificial Sequence: Synthetic polypeptide
GTAEAASASGTTGEAGEAAGLTPAGLTGPPGSP

SEQ ID NO: 567 - protein, 33 aa, Artificial Sequence
  Description of Artificial Sequence: Synthetic polypeptide
GTAEAASASGTTGAAGEAANATPAGLTGPPGSP

SEQ ID NO: 568 - protein, 33 aa, Artificial Sequence
  Description of Artificial Sequence: Synthetic polypeptide
GTAEAASASGTTGRAGEAAGLTPAGLTGPPGSP

SEQ ID NO: 569 - protein, 33 aa, Artificial Sequence
  Description of Artificial Sequence: Synthetic polypeptide
GTAEAASASGTTGRAGEAANATSAGATGPPGSP

SEQ ID NO: 570 - protein, 33 aa, Artificial Sequence
  Description of Artificial Sequence: Synthetic polypeptide
GTAEAASASGTTGEAGEAAGATSAGATGPPGSP

SEQ ID NO: 571 - protein, 30 aa, Artificial Sequence
  Description of Artificial Sequence: Synthetic polypeptide
GTAEAASASGESGRAANTEPPELGAGPGSP

SEQ ID NO: 572 - protein, 30 aa, Artificial Sequence
  Description of Artificial Sequence: Synthetic polypeptide
GTAEAASASGESGRAANTAPEGLTGPPGSP

SEQ ID NO: 573 - protein, 30 aa, Artificial Sequence
  Description of Artificial Sequence: Synthetic polypeptide
GTAEAASASGEPGRAANHEPSGLTEGPGSP

SEQ ID NO: 574 - protein, 33 aa, Artificial Sequence
  Description of Artificial Sequence: Synthetic polypeptide
GTAEAASASGESGRAANHTGAPPGGLTGPPGSP

SEQ ID NO: 575 - protein, 33 aa, Artificial Sequence
  Description of Artificial Sequence: Synthetic polypeptide
GTAEAASASGTTGRTGEGANATPGGLTGPPGSP

SEQ ID NO: 576 - protein, 33 aa, Artificial Sequence
  Description of Artificial Sequence: Synthetic polypeptide
GTAEAASASGRTGRSGEAANETPEGLEGPPGSP

SEQ ID NO: 577 - protein, 33 aa, Artificial Sequence
  Description of Artificial Sequence: Synthetic polypeptide
GTAEAASASGRTGRTGESANETPAGLGGPPGSP

SEQ ID NO: 578 - protein, 33 aa, Artificial Sequence
  Description of Artificial Sequence: Synthetic polypeptide
GTAEAASASGSTGRTGEPANETPAGLSGPPGSP

SEQ ID NO: 579 - protein, 33 aa, Artificial Sequence
  Description of Artificial Sequence: Synthetic polypeptide
GTAEAASASGTTGRAGEPANATPTGLSGPPGSP

SEQ ID NO: 580 - protein, 33 aa, Artificial Sequence
  Description of Artificial Sequence: Synthetic polypeptide
GTAEAASASGRTGRPGEGANATPTGLPGPPGSP

SEQ ID NO: 581 - protein, 33 aa, Artificial Sequence
  Description of Artificial Sequence: Synthetic polypeptide
GTAEAASASGRTGRGGEAANATPSGLGGPPGSP

SEQ ID NO: 582 - protein, 33 aa, Artificial Sequence
  Description of Artificial Sequence: Synthetic polypeptide
GTAEAASASGSTGRSGESANATPGGLGGPPGSP

SEQ ID NO: 583 - protein, 33 aa, Artificial Sequence
  Description of Artificial Sequence: Synthetic polypeptide
GTAEAASASGRTGRTGEEANATPAGLPGPPGSP

SEQ ID NO: 584 - protein, 33 aa, Artificial Sequence
  Description of Artificial Sequence: Synthetic polypeptide
GTAEAASASGATGRPGEPANTTPEGLEGPPGSP

SEQ ID NO: 585 - protein, 33 aa, Artificial Sequence
  Description of Artificial Sequence: Synthetic polypeptide
GTAEAASASGSTGRSGEPANATPGGLTGPPGSP

SEQ ID NO: 586 - protein, 33 aa, Artificial Sequence
  Description of Artificial Sequence: Synthetic polypeptide
GTAEAASASGPTGRGGEGANTTPTGLPGPPGSP

SEQ ID NO: 587 - protein, 33 aa, Artificial Sequence
  Description of Artificial Sequence: Synthetic polypeptide
GTAEAASASGPTGRSGEGANATPSGLTGPPGSP

SEQ ID NO: 588 - protein, 33 aa, Artificial Sequence
  Description of Artificial Sequence: Synthetic polypeptide
GTAEAASASGTTGRASEGANSTPAPLTEPPGSP

SEQ ID NO: 589 - protein, 33 aa, Artificial Sequence
  Description of Artificial Sequence: Synthetic polypeptide
GTAEAASASGTYGRAAEAANTTPAGLTAPPGSP

SEQ ID NO: 590 - protein, 33 aa, Artificial Sequence
  Description of Artificial Sequence: Synthetic polypeptide
GTAEAASASGTTGRATEGANATPAELTEPPGSP

SEQ ID NO: 591 - protein, 33 aa, Artificial Sequence
  Description of Artificial Sequence: Synthetic polypeptide
GTAEAASASGTVGRASEEANTTPASLTGPPGSP

SEQ ID NO: 592 - protein, 33 aa, Artificial Sequence
  Description of Artificial Sequence: Synthetic polypeptide
GTAEAASASGTTGRAPEAANATPAPLTGPPGSP

SEQ ID NO: 593 - protein, 33 aa, Artificial Sequence
  Description of Artificial Sequence: Synthetic polypeptide
GTAEAASASGTWGRATEPANATPAPLTSPPGSP

SEQ ID NO: 594 - protein, 33 aa, Artificial Sequence
  Description of Artificial Sequence: Synthetic polypeptide
GTAEAASASGTVGRASESANATPAELTSPPGSP

SEQ ID NO: 595 - protein, 33 aa, Artificial Sequence
  Description of Artificial Sequence: Synthetic polypeptide
GTAEAASASGTVGRAPEGANSTPAGLTGPPGSP

SEQ ID NO: 596 - protein, 33 aa, Artificial Sequence
  Description of Artificial Sequence: Synthetic polypeptide
GTAEAASASGTWGRATEAPNLEPATLTTPPGSP

SEQ ID NO: 597 - protein, 33 aa, Artificial Sequence
  Description of Artificial Sequence: Synthetic polypeptide
GTAEAASASGTTGRATEAPNLTPAPLTEPPGSP

SEQ ID NO: 598 - protein, 33 aa, Artificial Sequence
  Description of Artificial Sequence: Synthetic polypeptide
GTAEAASASGTQGRATEAPNLSPAALTSPPGSP

SEQ ID NO: 599 - protein, 33 aa, Artificial Sequence
  Description of Artificial Sequence: Synthetic polypeptide
GTAEAASASGTQGRAAEAPNLTPATLTAPPGSP

SEQ ID NO: 600 - protein, 33 aa, Artificial Sequence
  Description of Artificial Sequence: Synthetic polypeptide
GTAEAASASGTSGRAPEATNLAPAPLTGPPGSP

SEQ ID NO: 601 - protein, 33 aa, Artificial Sequence
  Description of Artificial Sequence: Synthetic polypeptide
GTAEAASASGTQGRAAEAANLTPAGLTEPPGSP

SEQ ID NO: 602 - protein, 33 aa, Artificial Sequence
  Description of Artificial Sequence: Synthetic polypeptide
GTAEAASASGTTGRAGSAPNLPPTGLTTPPGSP

SEQ ID NO: 603 - protein, 33 aa, Artificial Sequence
  Description of Artificial Sequence: Synthetic polypeptide
GTAEAASASGTTGRAGGAENLPPEGLTAPPGSP

SEQ ID NO: 604 - protein, 33 aa, Artificial Sequence
  Description of Artificial Sequence: Synthetic polypeptide
GTAEAASASGTTSRAGTATNLTPEGLTAPPGSP

SEQ ID NO: 605 - protein, 33 aa, Artificial Sequence
  Description of Artificial Sequence: Synthetic polypeptide
GTAEAASASGTTGRAGTATNLPPSGLTTPPGSP

SEQ ID NO: 606 - protein, 33 aa, Artificial Sequence
  Description of Artificial Sequence: Synthetic polypeptide
GTAEAASASGTTARAGEAENLSPSGLTAPPGSP

SEQ ID NO: 607 - protein, 33 aa, Artificial Sequence
  Description of Artificial Sequence: Synthetic polypeptide
GTAEAASASGTTGRAGGAGNLAPGGLTEPPGSP

SEQ ID NO: 608 - protein, 33 aa, Artificial Sequence
  Description of Artificial Sequence: Synthetic polypeptide
GTAEAASASGTTGRAGTATNLPPEGLTGPPGSP

SEQ ID NO: 609 - protein, 33 aa, Artificial Sequence
  Description of Artificial Sequence: Synthetic polypeptide
GTAEAASASGTTGRAGGAANLAPTGLTEPPGSP

SEQ ID NO: 610 - protein, 33 aa, Artificial Sequence
  Description of Artificial Sequence: Synthetic polypeptide
GTAEAASASGTTGRAGTAENLAPSGLTTPPGSP

SEQ ID NO: 611 - protein, 33 aa, Artificial Sequence
  Description of Artificial Sequence: Synthetic polypeptide
GTAEAASASGTTGRAGSATNLGPGGLTGPPGSP

SEQ ID NO: 612 - protein, 33 aa, Artificial Sequence
  Description of Artificial Sequence: Synthetic polypeptide
GTAEAASASGTTARAGGAENLTPAGLTEPPGSP

SEQ ID NO: 613 - protein, 33 aa, Artificial Sequence
  Description of Artificial Sequence: Synthetic polypeptide
GTAEAASASGTTARAGSAENLSPSGLTGPPGSP

SEQ ID NO: 614 - protein, 33 aa, Artificial Sequence
  Description of Artificial Sequence: Synthetic polypeptide
GTAEAASASGTTARAGGAGNLAPEGLTTPPGSP

SEQ ID NO: 615 - protein, 33 aa, Artificial Sequence
  Description of Artificial Sequence: Synthetic polypeptide
GTAEAASASGTTSRAGAAENLTPTGLTGPPGSP

SEQ ID NO: 616 - protein, 33 aa, Artificial Sequence
  Description of Artificial Sequence: Synthetic polypeptide
GTAEAASASGTYGRTTTPGNEPPASLEAEPGSP

SEQ ID NO: 617 - protein, 33 aa, Artificial Sequence
  Description of Artificial Sequence: Synthetic polypeptide
GTAEAASASGTYSRGESGPNEPPPGLTGPPGSP

SEQ ID NO: 618 - protein, 33 aa, Artificial Sequence
  Description of Artificial Sequence: Synthetic polypeptide
GTAEAASASGAWGRTGASENETPAPLGGEPGSP

SEQ ID NO: 619 - protein, 33 aa, Artificial Sequence
  Description of Artificial Sequence: Synthetic polypeptide
GTAEAASASGRWGRAETTPNTPPEGLETEPGSP

SEQ ID NO: 620 - protein, 33 aa, Artificial Sequence
  Description of Artificial Sequence: Synthetic polypeptide
GTAEAASASGESGRAANHTGAEPPELGAGPGSP

SEQ ID NO: 621 - protein, 33 aa, Artificial Sequence
  Description of Artificial Sequence: Synthetic polypeptide
GTAEAASASGTTGRAGEAANLTPAGLTESPGSP

SEQ ID NO: 622 - protein, 33 aa, Artificial Sequence
  Description of Artificial Sequence: Synthetic polypeptide
GTAEAASASGTTGRAGEAANLTPAALTESPGSP

SEQ ID NO: 623 - protein, 33 aa, Artificial Sequence
  Description of Artificial Sequence: Synthetic polypeptide
GTAEAASASGTTGRAGEAANLTPAPLTESPGSP

SEQ ID NO: 624 - protein, 33 aa, Artificial Sequence
  Description of Artificial Sequence: Synthetic polypeptide
GTAEAASASGTTGRAGEAANLTPEPLTESPGSP

SEQ ID NO: 625 - protein, 33 aa, Artificial Sequence
  Description of Artificial Sequence: Synthetic polypeptide
GTAEAASASGTTGRAGEAANLTPAGLTGAPGSP

SEQ ID NO: 626 - protein, 33 aa, Artificial Sequence
  Description of Artificial Sequence: Synthetic polypeptide
GTAEAASASGTTGRAGEAANLTPEGLTGAPGSP

SEQ ID NO: 627 - protein, 33 aa, Artificial Sequence
  Description of Artificial Sequence: Synthetic polypeptide
GTAEAASASGTTGRAGEAANLTPEPLTGAPGSP

SEQ ID NO: 628 - protein, 33 aa, Artificial Sequence
  Description of Artificial Sequence: Synthetic polypeptide
GTAEAASASGTTGRAGEAANLTPAGLTEAPGSP

SEQ ID NO: 629 - protein, 33 aa, Artificial Sequence
  Description of Artificial Sequence: Synthetic polypeptide
GTAEAASASGTTGRAGEAANLTPEGLTEAPGSP

SEQ ID NO: 630 - protein, 33 aa, Artificial Sequence
  Description of Artificial Sequence: Synthetic polypeptide
GTAEAASASGTTGRAGEAANLTPAPLTEAPGSP

SEQ ID NO: 631 - protein, 33 aa, Artificial Sequence
  Description of Artificial Sequence: Synthetic polypeptide
GTAEAASASGTTGRAGEAANLTPEPLTEAPGSP

SEQ ID NO: 632 - protein, 33 aa, Artificial Sequence
  Description of Artificial Sequence: Synthetic polypeptide
GTAEAASASGTTGRAGEAANLTPEPLTGPPGSP

SEQ ID NO: 633 - protein, 33 aa, Artificial Sequence
  Description of Artificial Sequence: Synthetic polypeptide
GTAEAASASGTTGRAGEAANLTPAGLTGGPGSP

SEQ ID NO: 634 - protein, 33 aa, Artificial Sequence
  Description of Artificial Sequence: Synthetic polypeptide
GTAEAASASGTTGRAGEAANLTPEGLTGGPGSP

SEQ ID NO: 635 - protein, 33 aa, Artificial Sequence
  Description of Artificial Sequence: Synthetic polypeptide
GTAEAASASGTTGRAGEAANLTPEALTGGPGSP

SEQ ID NO: 636 - protein, 33 aa, Artificial Sequence
  Description of Artificial Sequence: Synthetic polypeptide
GTAEAASASGTTGRAGEAANLTPEPLTGGPGSP

SEQ ID NO: 637 - protein, 33 aa, Artificial Sequence
  Description of Artificial Sequence: Synthetic polypeptide
GTAEAASASGTTGRAGEAANLTPAGLTEGPGSP

SEQ ID NO: 638 - protein, 33 aa, Artificial Sequence
  Description of Artificial Sequence: Synthetic polypeptide
GTAEAASASGTTGRAGEAANLTPEGLTEGPGSP

SEQ ID NO: 639 - protein, 33 aa, Artificial Sequence
  Description of Artificial Sequence: Synthetic polypeptide
GTAEAASASGTTGRAGEAANLTPAPLTEGPGSP

SEQ ID NO: 640 - protein, 33 aa, Artificial Sequence
  Description of Artificial Sequence: Synthetic polypeptide
GTAEAASASGTTGRAGEAANLTPEPLTEGPGSP

SEQ ID NO: 641 - protein, 30 aa, Artificial Sequence
  Description of Artificial Sequence: Synthetic polypeptide
GTAEAASASGEAGRSAEATSAGATGPPGSP

SEQ ID NO: 642 - protein, 30 aa, Artificial Sequence
  Description of Artificial Sequence: Synthetic polypeptide
GTAEAASASGSASGTYSRGESGPGSPPGSP

SEQ ID NO: 643 - protein, 30 aa, Artificial Sequence
  Description of Artificial Sequence: Synthetic polypeptide
GTAEAASASGSASGEAGRTDTHPGSPPGSP

SEQ ID NO: 644 - protein, 30 aa, Artificial Sequence
  Description of Artificial Sequence: Synthetic polypeptide
GTAEAASASGSASGEPGRAAEHPGSPPGSP

SEQ ID NO: 645 - protein, 30 aa, Artificial Sequence
  Description of Artificial Sequence: Synthetic polypeptide
GTAEAASASGSPAGESSRGTTIAGSPPGSP

SEQ ID NO: 646 - protein, 30 aa, Artificial Sequence
  Description of Artificial Sequence: Synthetic polypeptide
GTAEAASASGEAGESAGATPAGLTGPPGSP

SEQ ID NO: 647 - protein, 30 aa, Artificial Sequence
  Description of Artificial Sequence: Synthetic polypeptide
GTAEAASASGSASGAPLELEAGPGSPPGSP

SEQ ID NO: 648 - protein, 30 aa, Artificial Sequence
  Description of Artificial Sequence: Synthetic polypeptide
GTAEAASASGSASGEPPELGAGPGSPPGSP

SEQ ID NO: 649 - protein, 30 aa, Artificial Sequence
  Description of Artificial Sequence: Synthetic polypeptide
GTAEAASASGSASGEPSGLTEGPGSPPGSP

SEQ ID NO: 650 - protein, 30 aa, Artificial Sequence
  Description of Artificial Sequence: Synthetic polypeptide
GTAEAASASGSASGTPAPLTEPPGSPPGSP

SEQ ID NO: 651 - protein, 30 aa, Artificial Sequence
  Description of Artificial Sequence: Synthetic polypeptide
GTAEAASASGSASGTPAELTEPPGSPPGSP

SEQ ID NO: 652 - protein, 30 aa, Artificial Sequence
  Description of Artificial Sequence: Synthetic polypeptide
GTAEAASASGSASGPPPGLTGPPGSPPGSP

SEQ ID NO: 653 - protein, 30 aa, Artificial Sequence
  Description of Artificial Sequence: Synthetic polypeptide
GTAEAASASGSASGTPAPLGGEPGSPPGSP

SEQ ID NO: 654 - protein, 30 aa, Artificial Sequence
  Description of Artificial Sequence: Synthetic polypeptide
GTAEAASASGSPAGAPEGLTGPAGSPPGSP

SEQ ID NO: 655 - protein, 30 aa, Artificial Sequence
  Description of Artificial Sequence: Synthetic polypeptide
GTAEAASASGSPAGPPEGLETEAGSPPGSP

SEQ ID NO: 656 - protein, 30 aa, Artificial Sequence
  Description of Artificial Sequence: Synthetic polypeptide
GTAEAASASGSPTSGQGGLTGPGSEPPGSP

SEQ ID NO: 657 - protein, 30 aa, Artificial Sequence
  Description of Artificial Sequence: Synthetic polypeptide
GTAEAASASGSESAPPEGLETESTEPPGSP

SEQ ID NO: 658 - protein, 30 aa, Artificial Sequence
  Description of Artificial Sequence: Synthetic polypeptide
GTAEAASASGSEGSEPLELGAASETPPGSP

SEQ ID NO: 659 - protein, 30 aa, Artificial Sequence
  Description of Artificial Sequence: Synthetic polypeptide
GTAEAASASGSEGSGPAGLEAPSETPPGSP

SEQ ID NO: 660 - protein, 30 aa, Artificial Sequence
  Description of Artificial Sequence: Synthetic polypeptide
GTAEAASASGSEPTPPASLEAEPGSPPGSP

SEQ ID NO: 661 - protein, 12 aa, Artificial Sequence
  Description of Artificial Sequence: Synthetic peptide
GSPAGSPTSTEE

SEQ ID NO: 662 - protein, 12 aa, Artificial Sequence
  Description of Artificial Sequence: Synthetic peptide
GSEPATSGSETP

SEQ ID NO: 663 - protein, 12 aa, Artificial Sequence
  Description of Artificial Sequence: Synthetic peptide
GTSESATPESGP

SEQ ID NO: 664 - protein, 12 aa, Artificial Sequence
  Description of Artificial Sequence: Synthetic peptide
GTSTEPSEGSAP

SEQ ID NO: 665 - protein, 144 aa, Artificial Sequence
  Description of Artificial Sequence: Synthetic polypeptide
GSEPATSGSETPGTSESATPESGPGSEPATSGSETPGSPAGSPTSTEEGTSTEPSEGSAPGSEPATSGSETPGSEPATSGSETPGSEPATSGSETPGTSTEPSEGSAPGTSESATPESGPGSEPATSGSETPGTSTEPSEGSAP

SEQ ID NO: 666 - protein, 144 aa, Artificial Sequence
  Description of Artificial Sequence: Synthetic polypeptide
SPAGSPTSTEEGTSESATPESGPGTSTEPSEGSAPGSPAGSPTSTEEGTSTEPSEGSAPGTSTEPSEGSAPGTSESATPESGPGSEPATSGSETPGSEPATSGSETPGSPAGSPTSTEEGTSESATPESGPGTSTEPSEGSAPG

SEQ ID NO: 667 - protein, 144 aa, Artificial Sequence
  Description of Artificial Sequence: Synthetic polypeptide
TSTEPSEGSAPGSPAGSPTSTEEGTSTEPSEGSAPGTSTEPSEGSAPGTSESATPESGPGTSTEPSEGSAPGTSESATPESGPGSEPATSGSETPGTSTEPSEGSAPGTSTEPSEGSAPGTSESATPESGPGTSESATPESGPG

SEQ ID NO: 668 - protein, 144 aa, Artificial Sequence; identical to SEQ ID NO: 667
  Description of Artificial Sequence: Synthetic polypeptide

SEQ ID NO: 669 - protein, 144 aa, Artificial Sequence
  Description of Artificial Sequence: Synthetic polypeptide
SPAGSPTSTEEGTSESATPESGPGSEPATSGSETPGTSESATPESGPGTSTEPSEGSAPGTSTEPSEGSAPGTSTEPSEGSAPGTSTEPSEGSAPGTSTEPSEGSAPGTSTEPSEGSAPGSPAGSPTSTEEGTSTEPSEGSAPG

SEQ ID NO: 670 - protein, 144 aa, Artificial Sequence; identical to SEQ ID NO: 669
  Description of Artificial Sequence: Synthetic polypeptide

SEQ ID NO: 671 - protein, 144 aa, Artificial Sequence
  Description of Artificial Sequence: Synthetic polypeptide
TSESATPESGPGSEPATSGSETPGTSESATPESGPGSEPATSGSETPGTSESATPESGPGTSTEPSEGSAPGTSESATPESGPGSPAGSPTSTEEGSPAGSPTSTEEGSPAGSPTSTEEGTSESATPESGPGTSTEPSEGSAPG

SEQ ID NO: 672 - protein, 144 aa, Artificial Sequence; identical to SEQ ID NO: 671
  Description of Artificial Sequence: Synthetic polypeptide

SEQ ID NO: 673 - protein, 144 aa, Artificial Sequence
  Description of Artificial Sequence: Synthetic polypeptide
TSESATPESGPGSEPATSGSETPGTSESATPESGPGSEPATSGSETPGTSESATPESGPGTSTEPSEGSAPGSPAGSPTSTEEGTSESATPESGPGSEPATSGSETPGTSESATPESGPGSPAGSPTSTEEGSPAGSPTSTEEG

SEQ ID NO: 674 - protein, 144 aa, Artificial Sequence
  Description of Artificial Sequence: Synthetic polypeptide
TSTEPSEGSAPGTSESATPESGPGTSESATPESGPGTSESATPESGPGSEPATSGSETPGSEPATSGSETPGSPAGSPTSTEEGTSTEPSEGSAPGTSTEPSEGSAPGSEPATSGSETPGTSESATPESGPGTSTEPSEGSAPG

SEQ ID NO: 675 - protein, 288 aa, Artificial Sequence
  Description of Artificial Sequence: Synthetic polypeptide
GTSESATPESGPGSEPATSGSETPGTSESATPESGPGSEPATSGSETPGTSESATPESGPGTSTEPSEGSAPGSPAGSPTSTEEGTSESATPESGPGSEPATSGSETPGTSESATPESGPGSPAGSPTSTEEGSPAGSPTSTEEGTSTEPSEGSAPGTSESATPESGPGTSESATPESGPGTSESATPESGPGSEPATSGSETPGSEPATSGSETPGSPAGSPTSTEEGTSTEPSEGSAPGTSTEPSEGSAPGSEPATSGSETPGTSESATPESGPGTSTEPSEGSAP

SEQ ID NO: 676 - protein, 288 aa, Artificial Sequence
  Description of Artificial Sequence: Synthetic polypeptide
GSPAGSPTSTEEGTSESATPESGPGSEPATSGSETPGTSESATPESGPGTSTEPSEGSAPGTSTEPSEGSAPGTSTEPSEGSAPGTSTEPSEGSAPGTSTEPSEGSAPGTSTEPSEGSAPGSPAGSPTSTEEGTSTEPSEGSAPGTSESATPESGPGSEPATSGSETPGTSESATPESGPGSEPATSGSETPGTSESATPESGPGTSTEPSEGSAPGTSESATPESGPGSPAGSPTSTEEGSPAGSPTSTEEGSPAGSPTSTEEGTSESATPESGPGTSTEPSEGSAP

SEQ ID NO: 677 - protein, 576 aa, Artificial Sequence
  Description of Artificial Sequence: Synthetic polypeptide
GSPAGSPTSTEEGTSESATPESGPGTSTEPSEGSAPGSPAGSPTSTEEGTSTEPSEGSAPGTSTEPSEGSAPGTSESATPESGPGSEPATSGSETPGSEPATSGSETPGSPAGSPTSTEEGTSESATPESGPGTSTEPSEGSAPGTSTEPSEGSAPGSPAGSPTSTEEGTSTEPSEGSAPGTSTEPSEGSAPGTSESATPESGPGTSTEPSEGSAPGTSESATPESGPGSEPATSGSETPGTSTEPSEGSAPGTSTEPSEGSAPGTSESATPESGPGTSESATPESGPGSPAGSPTSTEEGTSESATPESGPGSEPATSGSETPGTSESATPESGPGTSTEPSEGSAPGTSTEPSEGSAPGTSTEPSEGSAPGTSTEPSEGSAPGTSTEPSEGSAPGTSTEPSEGSAPGSPAGSPTSTEEGTSTEPSEGSAPGTSESATPESGPGSEPATSGSETPGTSESATPESGPGSEPATSGSETPGTSESATPESGPGTSTEPSEGSAPGTSESATPESGPGSPAGSPTSTEEGSPAGSPTSTEEGSPAGSPTSTEEGTSESATPESGPGTSTEPSEGSAP

SEQ ID NO: 678 - protein, 625 aa, Artificial Sequence
  Description of Artificial Sequence: Synthetic polypeptide
MAEPAGSPTSTEEGTPGSGTASSSPGSSTPSGATGSPGASPGTSSTGSPGSPAGSPTSTEEGTSESATPESGPGTSTEPSEGSAPGSPAGSPTSTEEGTSTEPSEGSAPGTSTEPSEGSAPGTSESATPESGPGSEPATSGSETPGSEPATSGSETPGSPAGSPTSTEEGTSESATPESGPGTSTEPSEGSAPGTSTEPSEGSAPGSPAGSPTSTEEGTSTEPSEGSAPGTSTEPSEGSAPGTSESATPESGPGTSTEPSEGSAPGTSESATPESGPGSEPATSGSETPGTSTEPSEGSAPGTSTEPSEGSAPGTSESATPESGPGTSESATPESGPGSPAGSPTSTEEGTSESATPESGPGSEPATSGSETPGTSESATPESGPGTSTEPSEGSAPGTSTEPSEGSAPGTSTEPSEGSAPGTSTEPSEGSAPGTSTEPSEGSAPGTSTEPSEGSAPGSPAGSPTSTEEGTSTEPSEGSAPGTSESATPESGPGSEPATSGSETPGTSESATPESGPGSEPATSGSETPGTSESATPESGPGTSTEPSEGSAPGTSESATPESGPGSPAGSPTSTEEGSPAGSPTSTEEGSPAGSPTSTEEGTSESATPESGPGTSTEPSEGSAP

SEQ ID NO: 679 - protein, 864 aa, Artificial Sequence
  Description of Artificial Sequence: Synthetic polypeptide
GSPAGSPTSTEEGTSESATPESGPGTSTEPSEGSAPGSPAGSPTSTEEGTSTEPSEGSAPGTSTEPSEGSAPGTSESATPESGPGSEPATSGSETPGSEPATSGSETPGSPAGSPTSTEEGTSESATPESGPGTSTEPSEGSAPGTSTEPSEGSAPGSPAGSPTSTEEGTSTEPSEGSAPGTSTEPSEGSAPGTSESATPESGPGTSTEPSEGSAPGTSESATPESGPGSEPATSGSETPGTSTEPSEGSAPGTSTEPSEGSAPGTSESATPESGPGTSESATPESGPGSPAGSPTSTEEGTSESATPESGPGSEPATSGSETPGTSESATPESGPGTSTEPSEGSAPGTSTEPSEGSAPGTSTEPSEGSAPGTSTEPSEGSAPGTSTEPSEGSAPGTSTEPSEGSAPGSPAGSPTSTEEGTSTEPSEGSAPGTSESATPESGPGSEPATSGSETPGTSESATPESGPGSEPATSGSETPGTSESATPESGPGTSTEPSEGSAPGTSESATPESGPGSPAGSPTSTEEGSPAGSPTSTEEGSPAGSPTSTEEGTSESATPESGPGTSTEPSEGSAPGTSESATPESGPGSEPATSGSETPGTSESATPESGPGSEPATSGSETPGTSESATPESGPGTSTEPSEGSAPGSPAGSPTSTEEGTSESATPESGPGSEPATSGSETPGTSESATPESGPGSPAGSPTSTEEGSPAGSPTSTEEGTSTEPSEGSAPGTSESATPESGPGTSESATPESGPGTSESATPESGPGSEPATSGSETPGSEPATSGSETPGSPAGSPTSTEEGTSTEPSEGSAPGTSTEPSEGSAPGSEPATSGSETPGTSESATPESGPGTSTEPSEGSAP

SEQ ID NO: 680 - protein, 865 aa, Artificial Sequence
  Description of Artificial Sequence: Synthetic polypeptide
GGSPAGSPTSTEEGTSESATPESGPGTSTEPSEGSAPGSPAGSPTSTEEGTSTEPSEGSAPGTSTEPSEGSAPGTSESATPESGPGSEPATSGSETPGSEPATSGSETPGSPAGSPTSTEEGTSESATPESGPGTSTEPSEGSAPGTSTEPSEGSAPGSPAGSPTSTEEGTSTEPSEGSAPGTSTEPSEGSAPGTSESATPESGPGTSTEPSEGSAPGTSESATPESGPGSEPATSGSETPGTSTEPSEGSAPGTSTEPSEGSAPGTSESATPESGPGTSESATPESGPGSPAGSPTSTEEGTSESATPESGPGSEPATSGSETPGTSESATPESGPGTSTEPSEGSAPGTSTEPSEGSAPGTSTEPSEGSAPGTSTEPSEGSAPGTSTEPSEGSAPGTSTEPSEGSAPGSPAGSPTSTEEGTSTEPSEGSAPGTSESATPESGPGSEPATSGSETPGTSESATPESGPGSEPATSGSETPGTSESATPESGPGTSTEPSEGSAPGTSESATPESGPGSPAGSPTSTEEGSPAGSPTSTEEGSPAGSPTSTEEGTSESATPESGPGTSTEPSEGSAPGTSESATPESGPGSEPATSGSETPGTSESATPESGPGSEPATSGSETPGTSESATPESGPGTSTEPSEGSAPGSPAGSPTSTEEGTSESATPESGPGSEPATSGSETPGTSESATPESGPGSPAGSPTSTEEGSPAGSPTSTEEGTSTEPSEGSAPGTSESATPESGPGTSESATPESGPGTSESATPESGPGSEPATSGSETPGSEPATSGSETPGSPAGSPTSTEEGTSTEPSEGSAPGTSTEPSEGSAPGSEPATSGSETPGTSESATPESGPGTSTEPSEGSAP

SEQ ID NO: 681 - protein, 866 aa, Artificial Sequence
  Description of Artificial Sequence: Synthetic polypeptide
PGSPAGSPTSTEEGTSESATPESGPGTSTEPSEGSAPGSPAGSPTSTEEGTSTEPSEGSAPGTSTEPSEGSAPGTSESATPESGPGSEPATSGSETPGSEPATSGSETPGSPAGSPTSTEEGTSESATPESGPGTSTEPSEGSAPGTSTEPSEGSAPGSPAGSPTSTEEGTSTEPSEGSAPGTSTEPSEGSAPGTSESATPESGPGTSTEPSEGSAPGTSESATPESGPGSEPATSGSETPGTSTEPSEGSAPGTSTEPSEGSAPGTSESATPESGPGTSESATPESGPGSPAGSPTSTEEGTSESATPESGPGSEPATSGSETPGTSESATPESGPGTSTEPSEGSAPGTSTEPSEGSAPGTSTEPSEGSAPGTSTEPSEGSAPGTSTEPSEGSAPGTSTEPSEGSAPGSPAGSPTSTEEGTSTEPSEGSAPGTSESATPESGPGSEPATSGSETPGTSESATPESGPGSEPATSGSETPGTSESATPESGPGTSTEPSEGSAPGTSESATPESGPGSPAGSPTSTEEGSPAGSPTSTEEGSPAGSPTSTEEGTSESATPESGPGTSTEPSEGSAPGTSESATPESGPGSEPATSGSETPGTSESATPESGPGSEPATSGSETPGTSESATPESGPGTSTEPSEGSAPGSPAGSPTSTEEGTSESATPESGPGSEPATSGSETPGTSESATPESGPGSPAGSPTSTEEGSPAGSPTSTEEGTSTEPSEGSAPGTSESATPESGPGTSESATPESGPGTSESATPESGPGSEPATSGSETPGSEPATSGSETPGSPAGSPTSTEEGTSTEPSEGSAPGTSTEPSEGSAPGSEPATSGSETPGTSESATPESGPGTSTEPSEGSAPG

SEQ ID NO: 682 - protein, 1152 aa, Artificial Sequence
  Description of Artificial Sequence: Synthetic polypeptide
GSPAGSPTSTEEGTSESATPESGPGTSTEPSEGSAPGSPAGSPTSTEEGTSTEPSEGSAPGTSTEPSEGSAPGTSESATPESGPGSEPATSGSETPGSEPATSGSETPGSPAGSPTSTEEGTSESATPESGPGTSTEPSEGSAPGTSTEPSEGSAPGSPAGSPTSTEEGTSTEPSEGSAPGTSTEPSEGSAPGTSESATPESGPGTSTEPSEGSAPGTSESATPESGPGSEPATSGSETPGTSTEPSEGSAPGTSTEPSEGSAPGTSESATPESGPGTSESATPESGPGSPAGSPTSTEEGTSESATPESGPGSEPATSGSETPGTSESATPESGPGTSTEPSEGSAPGTSTEPSEGSAPGTSTEPSEGSAPGTSTEPSEGSAPGTSTEPSEGSAPGTSTEPSEGSAPGSPAGSPTSTEEGTSTEPSEGSAPGTSESATPESGPGSEPATSGSETPGTSESATPESGPGSEPATSGSETPGTSESATPESGPGTSTEPSEGSAPGTSESATPESGPGSPAGSPTSTEEGSPAGSPTSTEEGSPAGSPTSTEEGTSESATPESGPGTSTEPSEGSAPGTSESATPESGPGSEPATSGSETPGTSESATPESGPGSEPATSGSETPGTSESATPESGPGTSTEPSEGSAPGSPAGSPTSTEEGTSESATPESGPGSEPATSGSETPGTSESATPESGPGSPAGSPTSTEEGSPAGSPTSTEEGTSTEPSEGSAPGTSESATPESGPGTSESATPESGPGTSESATPESGPGSEPATSGSETPGSEPATSGSETPGSPAGSPTSTEEGTSTEPSEGSAPGTSTEPSEGSAPGSEPATSGSETPGTSESATPESGPGTSTEPSEGSAPGTSESATPESGPGSEPATSGSETPGTSESATPESGPGSEPATSGSETPGTSESATPESGPGTSTEPSEGSAPGSPAGSPTSTEEGTSESATPESGPGSEPATSGSETPGTSESATPESGPGSPAGSPTSTEEGSPAGSPTSTEEGTSTEPSEGSAPGTSESATPESGPGTSESATPESGPGTSESATPESGPGSEPATSGSETPGSEPATSGSETPGSPAGSPTSTEEGTSTEPSEGSAPGTSTEPSEGSAPGSEPATSGSETPGTSESATPESGPGTSTEPSEGSAP

SEQ ID NO: 683 - protein, 144 aa, Artificial Sequence
  Description of Artificial Sequence: Synthetic polypeptide
STEPSEGSAPGSPAGSPTSTEEGTSTEPSEGSAPGTSESATPESGPGSEPATSGSETPGTSESATPESGPGSEPATSGSETPGTSESATPESGPGTSTEPSEGSAPGTSESATPESGPGSPAGSPTSTEEGSPAGSPTSTEEGS

SEQ ID NO: 684 - protein, 144 aa, Artificial Sequence
  Description of Artificial Sequence: Synthetic polypeptide
SEPATSGSETPGTSESATPESGPGSEPATSGSETPGTSESATPESGPGTSTEPSEGSAPGSPAGSPTSTEEGTSESATPESGPGSEPATSGSETPGTSESATPESGPGSPAGSPTSTEEGSPAGSPTSTEEGTSTEPSEGSAPG

SEQ ID NO: 685 - protein, 180 aa, Artificial Sequence
  Description of Artificial Sequence: Synthetic polypeptide
TSTEEGTSESATPESGPGSEPATSGSETPGTSESATPESGPGSPAGSPTSTEEGSPAGSPTSTEEGTSTEPSEGSAPGTSESATPESGPGTSESATPESGPGTSESATPESGPGSEPATSGSETPGSEPATSGSETPGSPAGSPTSTEEGTSTEPSEGSAPGTSTEPSEGSAPGSEPATS

SEQ ID NO: 686 - protein, 216 aa, Artificial Sequence
  Description of Artificial Sequence: Synthetic polypeptide
PESGPGTSTEPSEGSAPGSPAGSPTSTEEGTSESATPESGPGSEPATSGSETPGTSESATPESGPGSPAGSPTSTEEGSPAGSPTSTEEGTSTEPSEGSAPGTSESATPESGPGTSESATPESGPGTSESATPESGPGSEPATSGSETPGSEPATSGSETPGSPAGSPTSTEEGTSTEPSEGSAPGTSTEPSEGSAPGSEPATSGSETPGTSESAT

SEQ ID NO: 687 - protein, 252 aa, Artificial Sequence
  Description of Artificial Sequence: Synthetic polypeptide
ESGPGSEPATSGSETPGTSESATPESGPGTSTEPSEGSAPGSPAGSPTSTEEGTSESATPESGPGSEPATSGSETPGTSESATPESGPGSPAGSPTSTEEGSPAGSPTSTEEGTSTEPSEGSAPGTSESATPESGPGTSESATPESGPGTSESATPESGPGSEPATSGSETPGSEPATSGSETPGSPAGSPTSTEEGTSTEPSEGSAPGTSTEPSEGSAPGSEPATSGSETPGTSESATPESGPGTSTEPSE

SEQ ID NO: 688 - protein, 288 aa, Artificial Sequence
  Description of Artificial Sequence: Synthetic polypeptide
TPESGPGTSTEPSEGSAPGTSESATPESGPGSEPATSGSETPGTSESATPESGPGSEPATSGSETPGTSESATPESGPGTSTEPSEGSAPGSPAGSPTSTEEGTSESATPESGPGSEPATSGSETPGTSESATPESGPGSPAGSPTSTEEGSPAGSPTSTEEGTSTEPSEGSAPGTSESATPESGPGTSESATPESGPGTSESATPESGPGSEPATSGSETPGSEPATSGSETPGSPAGSPTSTEEGTSTEPSEGSAPGTSTEPSEGSAPGSEPATSGSETPGTSESA

SEQ ID NO: 689 - protein, 324 aa, Artificial Sequence
  Description of Artificial Sequence: Synthetic polypeptide
PESGPGSPAGSPTSTEEGSPAGSPTSTEEGSPAGSPTSTEEGTSESATPESGPGTSTEPSEGSAPGTSESATPESGPGSEPATSGSETPGTSESATPESGPGSEPATSGSETPGTSESATPESGPGTSTEPSEGSAPGSPAGSPTSTEEGTSESATPESGPGSEPATSGSETPGTSESATPESGPGSPAGSPTSTEEGSPAGSPTSTEEGTSTEPSEGSAPGTSESATPESGPGTSESATPESGPGTSESATPESGPGSEPATSGSETPGSEPATSGSETPGSPAGSPTSTEEGTSTEPSEGSAPGTSTEPSEGSAPGSEPATS

SEQ ID NO: 690 - protein, 360 aa, Artificial Sequence
  Description of Artificial Sequence: Synthetic polypeptide
PESGPGTSTEPSEGSAPGTSESATPESGPGSPAGSPTSTEEGSPAGSPTSTEEGSPAGSPTSTEEGTSESATPESGPGTSTEPSEGSAPGTSESATPESGPGSEPATSGSETPGTSESATPESGPGSEPATSGSETPGTSESATPESGPGTSTEPSEGSAPGSPAGSPTSTEEGTSESATPESGPGSEPATSGSETPGTSESATPESGPGSPAGSPTSTEEGSPAGSPTSTEEGTSTEPSEGSAPGTSESATPESGPGTSESATPESGPGTSESATPESGPGSEPATSGSETPGSEPATSGSETPGSPAGSPTSTEEGTSTEPSEGSAPGTSTEPSEGSAPGSEPATSGSETPGTSESAT

SEQ ID NO: 691 - protein, 360 aa, Artificial Sequence
  Description of Artificial Sequence: Synthetic polypeptide
PESGPGSEPATSGSETPGTSESATPESGPGTSTEPSEGSAPGTSESATPESGPGSPAGSPTSTEEGSPAGSPTSTEEGSPAGSPTSTEEGTSESATPESGPGTSTEPSEGSAPGTSESATPESGPGSEPATSGSETPGTSESATPESGPGSEPATSGSETPGTSESATPESGPGTSTEPSEGSAPGSPAGSPTSTEEGTSESATPESGPGSEPATSGSETPGTSESATPESGPGSPAGSPTSTEEGSPAGSPTSTEEGTSTEPSEGSAPGTSESATPESGPGTSESATPESGPGTSESATPESGPGSEPATSGSETPGSEPATSGSETPGSPAGSPTSTEEGTSTEPSEGSAPGTSTEPS

SEQ ID NO: 692 - protein, 432 aa, Artificial Sequence
  Description of Artificial Sequence: Synthetic polypeptide
EGSAPGSPAGSPTSTEEGTSTEPSEGSAPGTSESATPESGPGSEPATSGSETPGTSESATPESGPGSEPATSGSETPGTSESATPESGPGTSTEPSEGSAPGTSESATPESGPGSPAGSPTSTEEGSPAGSPTSTEEGSPAGSPTSTEEGTSESATPESGPGTSTEPSEGSAPGTSESATPESGPGSEPATSGSETPGTSESATPESGPGSEPATSGSETPGTSESATPESGPGTSTEPSEGSAPGSPAGSPTSTEEGTSESATPESGPGSEPATSGSETPGTSESATPESGPGSPAGSPTSTEEGSPAGSPTSTEEGTSTEPSEGSAPGTSESATPESGPGTSESATPESGPGTSESATPESGPGSEPATSGSETPGSEPATSGSETPGSPAGSPTSTEEGTSTEPSEGSAPGTSTEPSEGSAPGSEPATS

SEQ ID NO: 693 - protein, 468 aa, Artificial Sequence
  Description of Artificial Sequence: Synthetic polypeptide
EGSAPGTSTEPSEGSAPGTSTEPSEGSAPGSPAGSPTSTEEGTSTEPSEGSAPGTSESATPESGPGSEPATSGSETPGTSESATPESGPGSEPATSGSETPGTSESATPESGPGTSTEPSEGSAPGTSESATPESGPGSPAGSPTSTEEGSPAGSPTSTEEGSPAGSPTSTEEGTSESATPESGPGTSTEPSEGSAPGTSESATPESGPGSEPATSGSETPGTSESATPESGPGSEPATSGSETPGTSESATPESGPGTSTEPSEGSAPGSPAGSPTSTEEGTSESATPESGPGSEPATSGSETPGTSESATPESGPGSPAGSPTSTEEGSPAGSPTSTEEGTSTEPSEGSAPGTSESATPESGPGTSESATPESGPGTSESATPESGPGSEPATSGSETPGSEPATSGSETPGSPAGSPTSTEEGTSTEPSEGSAPGTSTEPSEGSAPGSEPATSGSETPGTSESAT

SEQ ID NO: 694 - protein, 504 aa, Artificial Sequence
  Description of Artificial Sequence: Synthetic polypeptide
EGSAPGTSTEPSEGSAPGTSTEPSEGSAPGTSTEPSEGSAPGTSTEPSEGSAPGSPAGSPTSTEEGTSTEPSEGSAPGTSESATPESGPGSEPATSGSETPGTSESATPESGPGSEPATSGSETPGTSESATPESGPGTSTEPSEGSAPGTSESATPESGPGSPAGSPTSTEEGSPAGSPTSTEEGSPAGSPTSTEEGTSESATPESGPGTSTEPSEGSAPGTSESATPESGPGSEPATSGSETPGTSESATPESGPGSEPATSGSETPGTSESATPESGPGTSTEPSEGSAPGSPAGSPTSTEEGTSESATPESGPGSEPATSGSETPGTSESATPESGPGSPAGSPTSTEEGSPAGSPTSTEEGTSTEPSEGSAPGTSESATPESGPGTSESATPESGPGTSESATPESGPGSEPATSGSETPGSEPATSGSETPGSPAGSPTSTEEGTSTEPSEGSAPGTSTEPSEGSAPGSEPATSGSETPGTSESATPESGPGTSTEPS

SEQ ID NO: 695 - protein, 540 aa, Artificial Sequence
  Description of Artificial Sequence: Synthetic polypeptide
TPESGPGSPAGSPTSTEEGTSESATPESGPGSEPATSGSETPGTSESATPESGPGTSTEPSEGSAPGTSTEPSEGSAPGTSTEPSEGSAPGTSTEPSEGSAPGTSTEPSEGSAPGTSTEPSEGSAPGSPAGSPTSTEEGTSTEPSEGSAPGTSESATPESGPGSEPATSGSETPGTSESATPESGPGSEPATSGSETPGTSESATPESGPGTSTEPSEGSAPGTSESATPESGPGSPAGSPTSTEEGSPAGSPTSTEEGSPAGSPTSTEEGTSESATPESGPGTSTEPSEGSAPGTSESATPESGPGSEPATSGSETPGTSESATPESGPGSEPATSGSETPGTSESATPESGPGTSTEPSEGSAPGSPAGSPTSTEEGTSESATPESGPGSEPATSGSETPGTSESATPESGPGSPAGSPTSTEEGSPAGSPTSTEEGTSTEPSEGSAPGTSESATPESGPGTSESATPESGPGTSESATPESGPGSEPATSGSETPGSEPATSGSETPGSPAGSPTSTEEGTSTEPSEGSAPGTSTEP

SEQ ID NO: 696 - protein, 576 aa, Artificial Sequence
  Description of Artificial Sequence: Synthetic polypeptide
TPESGPGTSESATPESGPGSPAGSPTSTEEGTSESATPESGPGSEPATSGSETPGTSESATPESGPGTSTEPSEGSAPGTSTEPSEGSAPGTSTEPSEGSAPGTSTEPSEGSAPGTSTEPSEGSAPGTSTEPSEGSAPGSPAGSPTSTEEGTSTEPSEGSAPGTSESATPESGPGSEPATSGSETPGTSESATPESGPGSEPATSGSETPGTSESATPESGPGTSTEPSEGSAPGTSESATPESGPGSPAGSPTSTEEGSPAGSPTSTEEGSPAGSPTSTEEGTSESATPESGPGTSTEPSEGSAPGTSESATPESGPGSEPATSGSETPGTSESATPESGPGSEPATSGSETPGTSESATPESGPGTSTEPSEGSAPGSPAGSPTSTEEGTSESATPESGPGSEPATSGSETPGTSESATPESGPGSPAGSPTSTEEGSPAGSPTSTEEGTSTEPSEGSAPGTSESATPESGPGTSESATPESGPGTSESATPESGPGSEPATSGSETPGSEPATSGSETPGSPAGSPTSTEEGTSTEPSEGSAPGTSTEPSEGSAPGSEPATSGSETPGTSESA

SEQ ID NO: 697 - protein, 612 aa, Artificial Sequence
  Description of Artificial Sequence: Synthetic polypeptide
GSETPGTSTEPSEGSAPGTSTEPSEGSAPGTSESATPESGPGTSESATPESGPGSPAGSPTSTEEGTSESATPESGPGSEPATSGSETPGTSESATPESGPGTSTEPSEGSAPGTSTEPSEGSAPGTSTEPSEGSAPGTSTEPSEGSAPGTSTEPSEGSAPGTSTEPSEGSAPGSPAGSPTSTEEGTSTEPSEGSAPGTSESATPESGPGSEPATSGSETPGTSESATPESGPGSEPATSGSETPGTSESATPESGPGTSTEPSEGSAPGTSESATPESGPGSPAGSPTSTEEGSPAGSPTSTEEGSPAGSPTSTEEGTSESATPESGPGTSTEPSEGSAPGTSESATPESGPGSEPATSGSETPGTSESATPESGPGSEPATSGSETPGTSESATPESGPGTSTEPSEGSAPGSPAGSPTSTEEGTSESATPESGPGSEPATSGSETPGTSESATPESGPGSPAGSPTSTEEGSPAGSPTSTEEGTSTEPSEGSAPGTSESATPESGPGTSESATPESGPGTSESATPESGPGSEPATSGSETPGSEPATSGSETPGSPAGSPTSTEEGTSTEPSEGSAPGTSTEPSEGSAPGSEPATSGSETPGTSESAT

SEQ ID NO: 698 - protein, 648 aa, Artificial Sequence
  Description of Artificial Sequence: Synthetic polypeptide
PESGPGTSTEPSEGSAPGTSESATPESGPGSEPATSGSETPGTSTEPSEGSAPGTSTEPSEGSAPGTSESATPESGPGTSESATPESGPGSPAGSPTSTEEGTSESATPESGPGSEPATSGSETPGTSESATPESGPGTSTEPSEGSAPGTSTEPSEGSAPGTSTEPSEGSAPGTSTEPSEGSAPGTSTEPSEGSAPGTSTEPSEGSAPGSPAGSPTSTEEGTSTEPSEGSAPGTSESATPESGPGSEPATSGSETPGTSESATPESGPGSEPATSGSETPGTSESATPESGPGTSTEPSEGSAPGTSESATPESGPGSPAGSPTSTEEGSPAGSPTSTEEGSPAGSPTSTEEGTSESATPESGPGTSTEPSEGSAPGTSESATPESGPGSEPATSGSETPGTSESATPESGPGSEPATSGSETPGTSESATPESGPGTSTEPSEGSAPGSPAGSPTSTEEGTSESATPESGPGSEPATSGSETPGTSESATPESGPGSPAGSPTSTEEGSPAGSPTSTEEGTSTEPSEGSAPGTSESATPESGPGTSESATPESGPGTSESATPESGPGSEPATSGSETPGSEPATSGSETPGSPAGSPTSTEEGTSTEPSEGSAPGTSTEPSEGSAPGSEPATSGSETPGTSESAT

SEQ ID NO: 699 - protein, 684 aa, Artificial Sequence
  Description of Artificial Sequence: Synthetic polypeptide
EGSAPGSPAGSPTSTEEGTSTEPSEGSAPGTSTEPSEGSAPGTSESATPESGPGTSTEPSEGSAPGTSESATPESGPGSEPATSGSETPGTSTEPSEGSAPGTSTEPSEGSAPGTSESATPESGPGTSESATPESGPGSPAGSPTSTEEGTSESATPESGPGSEPATSGSETPGTSESATPESGPGTSTEPSEGSAPGTSTEPSEGSAPGTSTEPSEGSAPGTSTEPSEGSAPGTSTEPSEGSAPGTSTEPSEGSAPGSPAGSPTSTEEGTSTEPSEGSAPGTSESATPESGPGSEPATSGSETPGTSESATPESGPGSEPATSGSETPGTSESATPESGPGTSTEPSEGSAPGTSESATPESGPGSPAGSPTSTEEGSPAGSPTSTEEGSPAGSPTSTEEGTSESATPESGPGTSTEPSEGSAPGTSESATPESGPGSEPATSGSETPGTSESATPESGPGSEPATSGSETPGTSESATPESGPGTSTEPSEGSAPGSPAGSPTSTEEGTSESATPESGPGSEPATSGSETPGTSESATPESGPGSPAGSPTSTEEGSPAGSPTSTEEGTSTEPSEGSAPGTSESATPESGPGTSESATPESGPGTSESATPESGPGSEPATSGSETPGSEPATSGSETPGSPAGSPTSTEEGTSTEPSEGSAPGTSTEPSEGSAPGSEPATS

SEQ ID NO: 700 - protein, 720 aa, Artificial Sequence
  Description of Artificial Sequence: Synthetic polypeptide
TSGSETPGSEPATSGSETPGSPAGSPTSTEEGTSESATPESGPGTSTEPSEGSAPGTSTEPSEGSAPGSPAGSPTSTEEGTSTEPSEGSAPGTSTEPSEGSAPGTSESATPESGPGTSTEPSEGSAPGTSESATPESGPGSEPATSGSETPGTSTEPSEGSAPGTSTEPSEGSAPGTSESATPESGPGTSESATPESGPGSPAGSPTSTEEGTSESATPESGPGSEPATSGSETPGTSESATPESGPGTSTEPSEGSAPGTSTEPSEGSAPGTSTEPSEGSAPGTSTEPSEGSAPGTSTEPSEGSAPGTSTEPSEGSAPGSPAGSPTSTEEGTSTEPSEGSAPGTSESATPESGPGSEPATSGSETPGTSESATPESGPGSEPATSGSETPGTSESATPESGPGTSTEPSEGSAPGTSESATPESGPGSPAGSPTSTEEGSPAGSPTSTEEGSPAGSPTSTEEGTSESATPESGPGTSTEPSEGSAPGTSESATPESGPGSEPATSGSETPGTSESATPESGPGSEPATSGSETPGTSESATPESGPGTSTEPSEGSAPGSPAGSPTSTEEGTSESATPESGPGSEPATSGSETPGTSESATPESGPGSPAGSPTSTEEGSPAGSPTSTEEGTSTEPSEGSAPGTSESATPESGPGTSESATPESGPGTSESATPESGPGSEPATSGSETPGSEPATSGSETPGSPAGSPTSTEEGTSTE

SEQ ID NO: 701 - protein, 756 aa, Artificial Sequence
  Description of Artificial Sequence: Synthetic polypeptide
TSGSETPGSEPATSGSETPGSPAGSPTSTEEGTSESATPESGPGTSTEPSEGSAPGTSTEPSEGSAPGSPAGSPTSTEEGTSTEPSEGSAPGTSTEPSEGSAPGTSESATPESGPGTSTEPSEGSAPGTSESATPESGPGSEPATSGSETPGTSTEPSEGSAPGTSTEPSEGSAPGTSESATPESGPGTSESATPESGPGSPAGSPTSTEEGTSESATPESGPGSEPATSGSETPGTSESATPESGPGTSTEPSEGSAPGTSTEPSEGSAPGTSTEPSEGSAPGTSTEPSEGSAPGTSTEPSEGSAPGTSTEPSEGSAPGSPAGSPTSTEEGTSTEPSEGSAPGTSESATPESGPGSEPATSGSETPGTSESATPESGPGSEPATSGSETPGTSESATPESGPGTSTEPSEGSAPGTSESATPESGPGSPAGSPTSTEEGSPAGSPTSTEEGSPAGSPTSTEEGTSESATPESGPGTSTEPSEGSAPGTSESATPESGPGSEPATSGSETPGTSESATPESGPGSEPATSGSETPGTSESATPESGPGTSTEPSEGSAPGSPAGSPTSTEEGTSESATPESGPGSEPATSGSETPGTSESATPESGPGSPAGSPTSTEEGSPAGSPTSTEEGTSTEPSEGSAPGTSESATPESGPGTSESATPESGPGTSESATPESGPGSEPATSGSETPGSEPATSGSETPGSPAGSPTSTEEGTSTEPSEGSAPGTSTEPSEGSAPGSEPATSGSETPGTSES

SEQ ID NO: 702 - protein, 792 aa, Artificial Sequence
  Description of Artificial Sequence: Synthetic polypeptide
EGSAPGTSESATPESGPGSEPATSGSETPGSEPATSGSETPGSPAGSPTSTEEGTSESATPESGPGTSTEPSEGSAPGTSTEPSEGSAPGSPAGSPTSTEEGTSTEPSEGSAPGTSTEPSEGSAPGTSESATPESGPGTSTEPSEGSAPGTSESATPESGPGSEPATSGSETPGTSTEPSEGSAPGTSTEPSEGSAPGTSESATPESGPGTSESATPESGPGSPAGSPTSTEEGTSESATPESGPGSEPATSGSETPGTSESATPESGPGTSTEPSEGSAPGTSTEPSEGSAPGTSTEPSEGSAPGTSTEPSEGSAPGTSTEPSEGSAPGTSTEPSEGSAPGSPAGSPTSTEEGTSTEPSEGSAPGTSESATPESGPGSEPATSGSETPGTSESATPESGPGSEPATSGSETPGTSESATPESGPGTSTEPSEGSAPGTSESATPESGPGSPAGSPTSTEEGSPAGSPTSTEEGSPAGSPTSTEEGTSESATPESGPGTSTEPSEGSAPGTSESATPESGPGSEPATSGSETPGTSESATPESGPGSEPATSGSETPGTSESATPESGPGTSTEPSEGSAPGSPAGSPTSTEEGTSESATPESGPGSEPATSGSETPGTSESATPESGPGSPAGSPTSTEEGSPAGSPTSTEEGTSTEPSEGSAPGTSESATPESGPGTSESATPESGPGTSESATPESGPGSEPATSGSETPGSEPATSGSETPGSPAGSPTSTEEGTSTEPSEGSAPGTSTEPSEGSAPGSEPATSGSETPGTSESATPESGPGTSTEPS

SEQ ID NO: 703 - protein, 828 aa, Artificial Sequence
  Description of Artificial Sequence: Synthetic polypeptide
PESGPGTSTEPSEGSAPGSPAGSPTSTEEGTSTEPSEGSAPGTSTEPSEGSAPGTSESATPESGPGSEPATSGSETPGSEPATSGSETPGSPAGSPTSTEEGTSESATPESGPGTSTEPSEGSAPGTSTEPSEGSAPGSPAGSPTSTEEGTSTEPSEGSAPGTSTEPSEGSAPGTSESATPESGPGTSTEPSEGSAPGTSESATPESGPGSEPATSGSETPGTSTEPSEGSAPGTSTEPSEGSAPGTSESATPESGPGTSESATPESGPGSPAGSPTSTEEGTSESATPESGPGSEPATSGSETPGTSESATPESGPGTSTEPSEGSAPGTSTEPSEGSAPGTSTEPSEGSAPGTSTEPSEGSAPGTSTEPSEGSAPGTSTEPSEGSAPGSPAGSPTSTEEGTSTEPSEGSAPGTSESATPESGPGSEPATSGSETPGTSESATPESGPGSEPATSGSETPGTSESATPESGPGTSTEPSEGSAPGTSESATPESGPGSPAGSPTSTEEGSPAGSPTSTEEGSPAGSPTSTEEGTSESATPESGPGTSTEPSEGSAPGTSESATPESGPGSEPATSGSETPGTSESATPESGPGSEPATSGSETPGTSESATPESGPGTSTEPSEGSAPGSPAGSPTSTEEGTSESATPESGPGSEPATSGSETPGTSESATPESGPGSPAGSPTSTEEGSPAGSPTSTEEGTSTEPSEGSAPGTSESATPESGPGTSESATPESGPGTSESATPESGPGSEPATSGSETPGSEPATSGSETPGSPAGSPTSTEEGTSTEPSEGSAPGTSTEPSEGSAPGSEPATSGSETPGTSESAT

SEQ ID NO: 704 - protein, 869 aa, Artificial Sequence
  Description of Artificial Sequence: Synthetic polypeptide
GSPGSPAGSPTSTEEGTSESATPESGPGTSTEPSEGSAPGSPAGSPTSTEEGTSTEPSEGSAPGTSTEPSEGSAPGTSESATPESGPGSEPATSGSETPGSEPATSGSETPGSPAGSPTSTEEGTSESATPESGPGTSTEPSEGSAPGTSTEPSEGSAPGSPAGSPTSTEEGTSTEPSEGSAPGTSTEPSEGSAPGTSESATPESGPGTSTEPSEGSAPGTSESATPESGPGSEPATSGSETPGTSTEPSEGSAPGTSTEPSEGSAPGTSESATPESGPGTSESATPESGPGSPAGSPTSTEEGTSESATPESGPGSEPATSGSETPGTSESATPESGPGTSTEPSEGSAPGTSTEPSEGSAPGTSTEPSEGSAPGTSTEPSEGSAPGTSTEPSEGSAPGTSTEPSEGSAPGSPAGSPTSTEEGTSTEPSEGSAPGTSESATPESGPGSEPATSGSETPGTSESATPESGPGSEPATSGSETPGTSESATPESGPGTSTEPSEGSAPGTSESATPESGPGSPAGSPTSTEEGSPAGSPTSTEEGSPAGSPTSTEEGTSESATPESGPGTSTEPSEGSAPGTSESATPESGPGSEPATSGSETPGTSESATPESGPGSEPATSGSETPGTSESATPESGPGTSTEPSEGSAPGSPAGSPTSTEEGTSESATPESGPGSEPATSGSETPGTSESATPESGPGSPAGSPTSTEEGSPAGSPTSTEEGTSTEPSEGSAPGTSESATPESGPGTSESATPESGPGTSESATPESGPGSEPATSGSETPGSEPATSGSETPGSPAGSPTSTEEGTSTEPSEGSAPGTSTEPSEGSAPGSEPATSGSETPGTSESATPESGPGTSTEPSEGSAPGR

SEQ ID NO: 705 - protein, 144 aa, Artificial Sequence
  Description of Artificial Sequence: Synthetic polypeptide
SAGSPGSPAGSPTSTEEGTSESATPESGPGTSTEPSEGSAPGSPAGSPTSTEEGTSTEPSEGSAPGTSTEPSEGSAPGTSESATPESGPGSEPATSGSETPGSEPATSGSETPGSPAGSPTSTEEGTSESATPESGPGTESASR

SEQ ID NO: 706 - protein, 288 aa, Artificial Sequence
  Description of Artificial Sequence: Synthetic polypeptide
SAGSPTGPGSEPATSGSETPGTSESATPESGPGSEPATSGSETPGTSESATPESGPGTSTEPSEGSAPGSPAGSPTSTEEGTSESATPESGPGSEPATSGSETPGTSESATPESGPGSPAGSPTSTEEGSPAGSPTSTEEGTSTEPSEGSAPGTSESATPESGPGTSESATPESGPGTSESATPESGPGSEPATSGSETPGSEPATSGSETPGSPAGSPTSTEEGTSTEPSEGSAPGTSTEPSEGSAPGSEPATSGSETPGTSESATPESGPGTSTEPSEGSAPSASR

SEQ ID NO: 707 - protein, 432 aa, Artificial Sequence
  Description of Artificial Sequence: Synthetic polypeptide
SAGSPGSPAGSPTSTEEGTSESATPESGPGTSTEPSEGSAPGSPAGSPTSTEEGTSTEPSEGSAPGTSTEPSEGSAPGTSESATPESGPGSEPATSGSETPGSEPATSGSETPGSPAGSPTSTEEGTSESATPESGPGTSTEPSEGSAPGTSTEPSEGSAPGSPAGSPTSTEEGTSTEPSEGSAPGTSTEPSEGSAPGTSESATPESGPGTSTEPSEGSAPGTSESATPESGPGSEPATSGSETPGTSTEPSEGSAPGTSTEPSEGSAPGTSESATPESGPGTSESATPESGPGSPAGSPTSTEEGTSESATPESGPGSEPATSGSETPGTSESATPESGPGTSTEPSEGSAPGTSTEPSEGSAPGTSTEPSEGSAPGTSTEPSEGSAPGTSTEPSEGSAPGTSTEPSEGSAPGSPAGSPTSTEEGTESASR

SEQ ID NO: 708 - protein, 576 aa, Artificial Sequence
  Description of Artificial Sequence: Synthetic polypeptide
SAGSPTEEGTSESATPESGPGSEPATSGSETPGTSESATPESGPGTSTEPSEGSAPGTSTEPSEGSAPGTSTEPSEGSAPGTSTEPSEGSAPGTSTEPSEGSAPGTSTEPSEGSAPGSPAGSPTSTEEGTSTEPSEGSAPGTSESATPESGPGSEPATSGSETPGTSESATPESGPGSEPATSGSETPGTSESATPESGPGTSTEPSEGSAPGTSESATPESGPGSPAGSPTSTEEGSPAGSPTSTEEGSPAGSPTSTEEGTSESATPESGPGTSTEPSEGSAPGTSESATPESGPGSEPATSGSETPGTSESATPESGPGSEPATSGSETPGTSESATPESGPGTSTEPSEGSAPGSPAGSPTSTEEGTSESATPESGPGSEPATSGSETPGTSESATPESGPGSPAGSPTSTEEGSPAGSPTSTEEGTSTEPSEGSAPGTSESATPESGPGTSESATPESGPGTSESATPESGPGSEPATSGSETPGSEPATSGSETPGSPAGSPTSTEEGTSTEPSEGSAPGTSTEPSEGSAPGSEPATSGSETPGTSESATPESGPGTSTEPSEGSAPSASR

SEQ ID NO: 709 - protein, 864 aa, Artificial Sequence
  Description of Artificial Sequence: Synthetic polypeptide
SAGSPGSPAGSPTSTEEGTSESATPESGPGTSTEPSEGSAPGSPAGSPTSTEEGTSTEPSEGSAPGTSTEPSEGSAPGTSESATPESGPGSEPATSGSETPGSEPATSGSETPGSPAGSPTSTEEGTSESATPESGPGTSTEPSEGSAPGTSTEPSEGSAPGSPAGSPTSTEEGTSTEPSEGSAPGTSTEPSEGSAPGTSESATPESGPGTSTEPSEGSAPGTSESATPESGPGSEPATSGSETPGTSTEPSEGSAPGTSTEPSEGSAPGTSESATPESGPGTSESATPESGPGSPAGSPTSTEEGTSESATPESGPGSEPATSGSETPGTSESATPESGPGTSTEPSEGSAPGTSTEPSEGSAPGTSTEPSEGSAPGTSTEPSEGSAPGTSTEPSEGSAPGTSTEPSEGSAPGSPAGSPTSTEEGTSTEPSEGSAPGTSESATPESGPGSEPATSGSETPGTSESATPESGPGSEPATSGSETPGTSESATPESGPGTSTEPSEGSAPGTSESATPESGPGSPAGSPTSTEEGSPAGSPTSTEEGSPAGSPTSTEEGTSESATPESGPGTSTEPSEGSAPGTSESATPESGPGSEPATSGSETPGTSESATPESGPGSEPATSGSETPGTSESATPESGPGTSTEPSEGSAPGSPAGSPTSTEEGTSESATPESGPGSEPATSGSETPGTSESATPESGPGSPAGSPTSTEEGSPAGSPTSTEEGTSTEPSEGSAPGTSESATPESGPGTSESATPESGPGTSESATPESGPGSEPATSGSETPGSEPATSGSETPGSPAGSPTSTEEGTSTEPSEGSAPGTSTEPSEGSAPGSEPATSGSETPGTSESATPESGPGTESASR

SEQ ID NO: 710 - protein, 712 aa, Artificial Sequence
  Description of Artificial Sequence: Synthetic polypeptide
PGSPAGSPTSTEEGTSESATPESGPGTSTEPSEGSAPGSPAGSPTSTEEGTSTEPSEGSAPGTSTEPSEGSAPGTSESATPESGPGSEPATSGSETPGSEPATSGSETPGSPAGSPTSTEEGTSESATPESGPGTSTEPSEGSAPGTSTEPSEGSAPGSPAGSPTSTEEGTSTEPSEGSAPGTSTEPSEGSAPGTSESATPESGPGTSTEPSEGSAPGTSESATPESGPGSEPATSGSETPGTSTEPSEGSAPGTSTEPSEGSAPGTSESATPESGPGTSESATPESGPGSPAGSPTSTEEGTSESATPESGPGSEPATSGSETPGTSESATPESGPGTSTEPSEGSAPGTSTEPSEGSAPGTSTEPSEGSAPGTSTEPSEGSAPGTSTEPSEGSAPGTSTEPSEGSAPGSPAGSPTSTEEGTSTEPSEGSAPGTSESATPESGPGSEPATSGSETPGTSESATPESGPGSEPATSGSETPGTSESATPESGPGTSTEPSEGSAPGTSESATPESGPGSPAGSPTSTEEGSPAGSPTSTEEGSPAGSPTSTEEGTSESATPESGPGTSTEPSEGSAPGTSESATPESGPGSEPATSGSETPGTSESATPESGPGSEPATSGSETPGTSESATPESGPGTSTEPSEGSAPGSPAGSPTSTEEGTSESATPESGPGSEPATSGSETPGTSESATPESGPGSPAGSPTSTEAHHH

SEQ ID NO: 711 - protein, 864 aa, Artificial Sequence
  Description of Artificial Sequence: Synthetic polypeptide
GSPGAGSPAGSPTSTEEGTSESATPESGPGTSTEPSEGSAPGSPAGSPTSTEEGTSTEPSEGSAPGTSTEPSEGSAPGTSESATPESGPGSEPATSGSETPGSEPATSGSETPGSPAGSPTSTEEGTSESATPESGPGTSTEPSEGSAPGTSTEPSEGSAPGSPAGSPTSTEEGTSTEPSEGSAPGTSTEPSEGSAPGTSESATPESGPGTSTEPSEGSAPGTSESATPESGPGSEPATSGSETPGTSTEPSEGSAPGTSTEPSEGSAPGTSESATPESGPGTSESATPESGPGSPAGSPTSTEEGTSESATPESGPGSEPATSGSETPGTSESATPESGPGTSTEPSEGSAPGTSTEPSEGSAPGTSTEPSEGSAPGTSTEPSEGSAPGTSTEPSEGSAPGTSTEPSEGSAPGSPAGSPTSTEEGTSTEPSEGSAPGTSESATPESGPGSEPATSGSETPGTSESATPESGPGSEPATSGSETPGTSESATPESGPGTSTEPSEGSAPGTSESATPESGPGSPAGSPTSTEEGSPAGSPTSTEEGSPAGSPTSTEEGTSESATPESGPGTSTEPSEGSAPGTSESATPESGPGSEPATSGSETPGTSESATPESGPGSEPATSGSETPGTSESATPESGPGTSTEPSEGSAPGSPAGSPTSTEEGTSESATPESGPGSEPATSGSETPGTSESATPESGPGSPAGSPTSTEEGSPAGSPTSTEEGTSTEPSEGSAPGTSESATPESGPGTSESATPESGPGTSESATPESGPGSEPATSGSETPGSEPATSGSETPGSPAGSPTSTEEGTSTEPSEGSAPGTSTEPSEGSAPGSEPATSGSETPGTSESATPESGPGTESASR

SEQ ID NO: 712 - protein, 288 aa, Artificial Sequence
  Description of Artificial Sequence: Synthetic polypeptide
SPAGSPTSTEEGTSESATPESGPGTSTEPSEGSAPGTSESATPESGPGSEPATSGSETPGTSESATPESGPGSEPATSGSETPGTSESATPESGPGTSTEPSEGSAPGSPAGSPTSTEEGTSESATPESGPGSEPATSGSETPGTSESATPESGPGSPAGSPTSTEEGSPAGSPTSTEEGTSTEPSEGSAPGTSESATPESGPGTSESATPESGPGTSESATPESGPGSEPATSGSETPGSEPATSGSETPGSPAGSPTSTEEGTSTEPSEGSAPGTSTEPSEGSAPG

SEQ ID NO: 713 - protein, 284 aa, Artificial Sequence
  Description of Artificial Sequence: Synthetic polypeptide
GTSESATPESGPGSEPATSGSETPGTSESATPESGPGSEPATSGSETPGTSESATPESGPGTSTEPSEGSAPGSPAGSPTSTEEGTSESATPESGPGSEPATSGSETPGTSESATPESGPGSPAGSPTSTEEGSPAGSPTSTEEGTSTEPSEGSAPGTSESATPESGPGTSESATPESGPGTSESATPESGPGSEPATSGSETPGSEPATSGSETPGSPAGSPTSTEEGTSTEPSEGSAPGTSTEPSEGSAPGSEPATSGSETPGTSESATPESGPGTSTEPSE

SEQ ID NO: 714 - protein, 292 aa, Artificial Sequence
  Description of Artificial Sequence: Synthetic polypeptide
SPAGSPTSTEEGTSESATPESGPGTSTEPSEGSAPGTSESATPESGPGSEPATSGSETPGTSESATPESGPGSEPATSGSETPGTSESATPESGPGTSTEPSEGSAPGSPAGSPTSTEEGTSESATPESGPGSEPATSGSETPGTSESATPESGPGSPAGSPTSTEEGSPAGSPTSTEEGTSTEPSEGSAPGTSESATPESGPGTSESATPESGPGTSESATPESGPGSEPATSGSETPGSEPATSGSETPGSPAGSPTSTEEGTSTEPSEGSAPGTSTEPSEGSAPGGSAP

SEQ ID NO: 715 - protein, 864 aa, Artificial Sequence
  Description of Artificial Sequence: Synthetic polypeptide
AGSPTSTEEGTSESATPESGPGTSTEPSEGSAPGSPAGSPTSTEEGTSTEPSEGSAPGTSTEPSEGSAPGTSESATPESGPGSEPATSGSETPGSEPATSGSETPGSPAGSPTSTEEGTSESATPESGPGTSTEPSEGSAPGTSTEPSEGSAPGSPAGSPTSTEEGTSTEPSEGSAPGTSTEPSEGSAPGTSESATPESGPGTSTEPSEGSAPGTSESATPESGPGSEPATSGSETPGTSTEPSEGSAPGTSTEPSEGSAPGTSESATPESGPGTSESATPESGPGSPAGSPTSTEEGTSESATPESGPGSEPATSGSETPGTSESATPESGPGTSTEPSEGSAPGTSTEPSEGSAPGTSTEPSEGSAPGTSTEPSEGSAPGTSTEPSEGSAPGTSTEPSEGSAPGSPAGSPTSTEEGTSTEPSEGSAPGTSESATPESGPGSEPATSGSETPGTSESATPESGPGSEPATSGSETPGTSESATPESGPGTSTEPSEGSAPGTSESATPESGPGSPAGSPTSTEEGSPAGSPTSTEEGSPAGSPTSTEEGTSESATPESGPGTSTEPSEGSAPGTSESATPESGPGSEPATSGSETPGTSESATPESGPGSEPATSGSETPGTSESATPESGPGTSTEPSEGSAPGSPAGSPTSTEEGTSESATPESGPGSEPATSGSETPGTSESATPESGPGSPAGSPTSTEEGSPAGSPTSTEEGTSTEPSEGSAPGTSESATPESGPGTSESATPESGPGTSESATPESGPGSEPATSGSETPGSEPATSGSETPGSPAGSPTSTEEGTSTEPSEGSAPGTSTEPSEGSAPGSEPATSGSETPGTSESATPESGPGTSTEPSEGAAEPEA

SEQ ID NO: 716 - protein, 867 aa, Artificial Sequence
  Description of Artificial Sequence: Synthetic polypeptide
GSPAGSPTSTEEGTSESATPESGPGTSTEPSEGSAPGSPAGSPTSTEEGTSTEPSEGSAPGTSTEPSEGSAPGTSESATPESGPGSEPATSGSETPGSEPATSGSETPGSPAGSPTSTEEGTSESATPESGPGTSTEPSEGSAPGTSTEPSEGSAPGSPAGSPTSTEEGTSTEPSEGSAPGTSTEPSEGSAPGTSESATPESGPGTSTEPSEGSAPGTSESATPESGPGSEPATSGSETPGTSTEPSEGSAPGTSTEPSEGSAPGTSESATPESGPGTSESATPESGPGSPAGSPTSTEEGTSESATPESGPGSEPATSGSETPGTSESATPESGPGTSTEPSEGSAPGTSTEPSEGSAPGTSTEPSEGSAPGTSTEPSEGSAPGTSTEPSEGSAPGTSTEPSEGSAPGSPAGSPTSTEEGTSTEPSEGSAPGTSESATPESGPGSEPATSGSETPGTSESATPESGPGSEPATSGSETPGTSESATPESGPGTSTEPSEGSAPGTSESATPESGPGSPAGSPTSTEEGSPAGSPTSTEEGSPAGSPTSTEEGTSESATPESGPGTSTEPSEGSAPGTSESATPESGPGSEPATSGSETPGTSESATPESGPGSEPATSGSETPGTSESATPESGPGTSTEPSEGSAPGSPAGSPTSTEEGTSESATPESGPGSEPATSGSETPGTSESATPESGPGSPAGSPTSTEEGSPAGSPTSTEEGTSTEPSEGSAPGTSESATPESGPGTSESATPESGPGTSESATPESGPGSEPATSGSETPGSEPATSGSETPGSPAGSPTSTEEGTSTEPSEGSAPGTSTEPSEGSAPGSEPATSGSETPGTSESATPESGPGTSTEPSEGAAEPEA

SEQ ID NO: 717 - protein, 867 aa, Artificial Sequence
  Description of Artificial Sequence: Synthetic polypeptide
SPGSPAGSPTSTEEGTSESATPESGPGTSTEPSEGSAPGSPAGSPTSTEEGTSTEPSEGSAPGTSTEPSEGSAPGTSESATPESGPGSEPATSGSETPGSEPATSGSETPGSPAGSPTSTEEGTSESATPESGPGTSTEPSEGSAPGTSTEPSEGSAPGSPAGSPTSTEEGTSTEPSEGSAPGTSTEPSEGSAPGTSESATPESGPGTSTEPSEGSAPGTSESATPESGPGSEPATSGSETPGTSTEPSEGSAPGTSTEPSEGSAPGTSESATPESGPGTSESATPESGPGSPAGSPTSTEEGTSESATPESGPGSEPATSGSETPGTSESATPESGPGTSTEPSEGSAPGTSTEPSEGSAPGTSTEPSEGSAPGTSTEPSEGSAPGTSTEPSEGSAPGTSTEPSEGSAPGSPAGSPTSTEEGTSTEPSEGSAPGTSESATPESGPGSEPATSGSETPGTSESATPESGPGSEPATSGSETPGTSESATPESGPGTSTEPSEGSAPGTSESATPESGPGSPAGSPTSTEEGSPAGSPTSTEEGSPAGSPTSTEEGTSESATPESGPGTSTEPSEGSAPGTSESATPESGPGSEPATSGSETPGTSESATPESGPGSEPATSGSETPGTSESATPESGPGTSTEPSEGSAPGSPAGSPTSTEEGTSESATPESGPGSEPATSGSETPGTSESATPESGPGSPAGSPTSTEEGSPAGSPTSTEEGTSTEPSEGSAPGTSESATPESGPGTSESATPESGPGTSESATPESGPGSEPATSGSETPGSEPATSGSETPGSPAGSPTSTEEGTSTEPSEGSAPGTSTEPSEGSAPGSEPATSGSETPGTSESATPESGPGTSTEPSEGSAPG

SEQ ID NO: 718 - protein, 868 aa, Artificial Sequence
  Description of Artificial Sequence: Synthetic polypeptide
PGSPAGSPTSTEEGTSESATPESGPGTSTEPSEGSAPGSPAGSPTSTEEGTSTEPSEGSAPGTSTEPSEGSAPGTSESATPESGPGSEPATSGSETPGSEPATSGSETPGSPAGSPTSTEEGTSESATPESGPGTSTEPSEGSAPGTSTEPSEGSAPGSPAGSPTSTEEGTSTEPSEGSAPGTSTEPSEGSAPGTSESATPESGPGTSTEPSEGSAPGTSESATPESGPGSEPATSGSETPGTSTEPSEGSAPGTSTEPSEGSAPGTSESATPESGPGTSESATPESGPGSPAGSPTSTEEGTSESATPESGPGSEPATSGSETPGTSESATPESGPGTSTEPSEGSAPGTSTEPSEGSAPGTSTEPSEGSAPGTSTEPSEGSAPGTSTEPSEGSAPGTSTEPSEGSAPGSPAGSPTSTEEGTSTEPSEGSAPGTSESATPESGPGSEPATSGSETPGTSESATPESGPGSEPATSGSETPGTSESATPESGPGTSTEPSEGSAPGTSESATPESGPGSPAGSPTSTEEGSPAGSPTSTEEGSPAGSPTSTEEGTSESATPESGPGTSTEPSEGSAPGTSESATPESGPGSEPATSGSETPGTSESATPESGPGSEPATSGSETPGTSESATPESGPGTSTEPSEGSAPGSPAGSPTSTEEGTSESATPESGPGSEPATSGSETPGTSESATPESGPGSPAGSPTSTEEGSPAGSPTSTEEGTSTEPSEGSAPGTSESATPESGPGTSESATPESGPGTSESATPESGPGSEPATSGSETPGSEPATSGSETPGSPAGSPTSTEEGTSTEPSEGSAPGTSTEPSEGSAPGSEPATSGSETPGTSESATPESGPGTSTEPSEGAAEPEA

SEQ ID NO: 719 - protein, 123 aa, Artificial Sequence [sequence omitted]

SEQ ID NO: 720 - protein, 122 aa, Artificial Sequence
  Description of Artificial Sequence: Synthetic polypeptide
EVQLVESGGGLVQPGGSLRLSCAASGFTFSSYDIHWVRQATGKGLEWVSAIGPAGDTYYPGSVKGRFTISRENAKNSLYLQMNSLRAGDTAVYYCARGLITFGGLIAPFDYWGQGTLVTVSS

SEQ ID NO: 721 - protein, 120 aa, Artificial Sequence
  Description of Artificial Sequence: Synthetic polypeptide
QVKLEQSGAEVVKPGASVKLSCKASGFNIKDSYMHWLRQGPGQRLEWIGWIDPENGDTEYAPKFQGKATFTTDTSANTAYLGLSSLRPEDTAVYYCNEGTPTGPYYFDYWGQGTLVTVSS

SEQ ID NO: 722 - protein, 121 aa, Artificial Sequence
  Description of Artificial Sequence: Synthetic polypeptide
EVQLVESGGGLVQPGGSLRLSCAASGFNIKDTYMHWVRQAPGKGLEWVARIDPANGNSKYADSVKGRFTISADTSKNTAYLQMNSLRAEDTAVYYCAPFGYYVSDYAMAYWGQGTLVTVSS

SEQ ID NO: 723 - protein, 121 aa, Artificial Sequence
  Description of Artificial Sequence: Synthetic polypeptide
EVQLVESGGGLVQPGGSLRLSCAASGFNIKDTYMHWVRQAPGKGLEWVARIDPANGNSKYVPKFQGRATISADTSKNTAYLQMNSLRAEDTAVYYCAPFGYYVSDYAMAYWGQGTLVTVSS

SEQ ID NO: 724 - protein, 119 aa, Artificial Sequence
  Description of Artificial Sequence: Synthetic polypeptide
EVQLVESGGGVVQPGRSLRLSCSASGFDFTTYWMSWVRQAPGKGLEWIGEIHPDSSTINYAPSLKDRFTISRDNAKNTLFLQMDSLRPEDTGVYFCASLYFGFPWFAYWGQGTPVTVSS

SEQ ID NO: 725 - protein, 121 aa, Artificial Sequence
  Description of Artificial Sequence: Synthetic polypeptide
EVKLVESGGGLVQPGGSLRLSCATSGFTFTDYYMNWVRQPPGKALEWLGFIGNKANGYTTEYSASVKGRFTISRDKSQSILYLQMNTLRAEDSATYYCTRDRGLRFYFDYWGQGTTLTVSS

SEQ ID NO: 726 - protein, 121 aa, Artificial Sequence
  Description of Artificial Sequence: Synthetic polypeptide
EVQLVESGGGLVQPGRSLRLSCAASGFTVSSYWMHWVRQAPGKGLEWVGFIRNKANGGTTEYAASVKGRFTISRDDSKNTLYLQMNSLRAEDTAVYYCARDRGLRFYFDYWGQGTTVTVSS

SEQ ID NO: 727 - protein, 124 aa, Artificial Sequence
  Description of Artificial Sequence: Synthetic polypeptide
QVQLQQSGAELVRPGSSVKISCKASGYAFSSYWMNWVKQRPGQGLEWIGQIWPGDGDTNYNGKFKGKATLTADESSSTAYMQLSSLASEDSAVYFCARRETTTVGRYYYAMDYWGQGTTVTVSS

SEQ ID NO: 728 - protein, 122 aa, Artificial Sequence
  Description of Artificial Sequence: Synthetic polypeptide
EVQLVESGGGLVQPGRSLRLSCAASGFTFNDYAMHWVRQAPGKGLEWVSTISWNSGSIGYADSVKGRFTISRDNAKKSLYLQMNSLRAEDTALYYCAKDIQYGNYYYGMDVWGQGTTVTVSS

SEQ ID NO: 729 - protein, 122 aa, Artificial Sequence
  Description of Artificial Sequence: Synthetic polypeptide
QAYLQQSGAELVRPGASVKMSCKASGYTFTSYNMHWVKQTPRQGLEWIGAIYPGNGDTSYNQKFKGKATLTVDKSSSTAYMQLSSLTSEDSAVYFCARVVYYSNSYWYFDVWGTGTTVTVSG

SEQ ID NO: 730 - protein, 119 aa, Artificial Sequence
  Description of Artificial Sequence: Synthetic polypeptide
QVQLVQSGAEVKKPGSSVKVSCKASGYAFSYSWINWVRQAPGQGLEWMGRIFPGDGDTDYNGKFKGRVTITADKSTSTAYMELSSLRSEDTAVYYCARNVFDGYWLVYWGQGTLVTVSS

SEQ ID NO: 731 - protein, 122 aa, Artificial Sequence [sequence omitted]

SEQ ID NO: 732 - protein, 121 aa, Artificial Sequence [sequence omitted]

SEQ ID NO: 733 - protein, 122 aa, Artificial Sequence [sequence omitted]

SEQ ID NO: 734 - protein, 114 aa, Artificial Sequence
  Description of Artificial Sequence: Synthetic polypeptide
QLVQSGAEVKKPGSSVKVSCKASGYTITDSNIHWVRQAPGQSLEWIGYIYPYNGGTDYNQKFKNRATLTVDNPTNTAYMELSSLRSEDTDFYYCVNGNPWLAYWGQGTLVTVSS

SEQ ID NO: 735 - protein, 122 aa, Artificial Sequence [sequence omitted]

SEQ ID NO: 736 - protein, 118 aa, Artificial Sequence
  Description of Artificial Sequence: Synthetic polypeptide
QIQLVQSGPEVKKPGETVKISCKASGYTFTNYGMNWVKQAPGKGLKWMGWINTYTGEPTYADAFKGRFAFSLETSASTAYLQINNLKNEDTATYFCARDYGDYGMDYWGQGTSVTVSS

SEQ ID NO: 737 - protein, 118 aa, Artificial Sequence
  Description of Artificial Sequence: Synthetic polypeptide
QVQLQQSGTELMTPGASVTMSCKTSGYTFSTYWIEWVKQRPGHGLEWIGEILGPSGYTDYNEKFKAKATFTADTSSNTAYMQLSSLASEDSAVYYCARWDRLYAMDYWGGGTSVTVSS

SEQ ID NO: 738 - protein, 118 aa, Artificial Sequence
  Description of Artificial Sequence: Synthetic polypeptide
QVQLVESGGGVVQPGRSLRLSCAASGFTFSSYIMHWVRQAPGKGLEWVAVISYDGRNKYYADSVKGRFTISRDNSKNTLYLQMNSLRAEDTAVYYCARDTDGYDFDYWGQGTLVTVSS

SEQ ID NO: 739 - protein, 119 aa, Artificial Sequence
  Description of Artificial Sequence: Synthetic polypeptide
QIQLVESGGGVVQPGRSLRLSCAASGFTFGYYAMHWVRQAPGKGLEWVAVISYDGSIKYYADSVKGRFTISRDNSKNTLYLQMNSLRAEDTAVYYCAREGPYSNYLDYWGQGTLVTVSS

SEQ ID NO: 740 - protein, 118 aa, Artificial Sequence
  Description of Artificial Sequence: Synthetic polypeptide
QVQLVESGGGVVQPGRSLRLSCATSGFTFSDYGMHWVRQAPGKGLEWVAVIWYDGSNKYYADSVKGRFTISRDNSKKTLSLQMNSLRAEDTAVYYCARDSIMVRGDYWGQGTLVTVSS

SEQ ID NO: 741 - protein, 118 aa, Artificial Sequence
  Description of Artificial Sequence: Synthetic polypeptide
QVQLVESGGGVVQPGRSLRLSCAASGFTFSDHGMHWVRQAPGKGLEWVAVIWYDGSNKYYADSVKGRFTISRDNSKNTLYLQMNSLRAEDTAVYYCARDSIMVRGDYWGQGTLVTVSS

SEQ ID NO: 742 - protein, 122 aa, Artificial Sequence
  Description of Artificial Sequence: Synthetic polypeptide
QVQLQESGPGLVKPSETLSLTCTVSGGSVSSDYYYWSWIRQPPGKGLEWLGYIYYSGSTNYNPSLKSRVTISVDTSKNQFSLKLRSVTTADTAVYYCARGDGDYGGNCFDYWGQGTLVTVSS

SEQ ID NO: 743 - protein, 117 aa, Artificial Sequence
  Description of Artificial Sequence: Synthetic polypeptide
QVQLVQSGAEVKKPGASVKVSCKASGYTFTSYGFSWVRQAPGQGLEWMGWISASNGNTYYAQKLQGRVTMTTDTSTSTAYMELRSLRSDDTAVYYCARVYADYADYWGQGTLVTVSS

SEQ ID NO: 744 - protein, 115 aa, Artificial Sequence [sequence omitted]

SEQ ID NO: 745 - protein, 119 aa, Artificial Sequence [sequence omitted]

SEQ ID NO: 746 - protein, 125 aa, Artificial Sequence
  Description of Artificial Sequence: Synthetic polypeptide
QVQLVESGGGVVQPGRSLRLSCAASGFTFSSYGMHWVRQAPGKGLEWVAVIWYDGSNKYYADSVKGRFTISRDNSKNTLYLQMNSLRAEDTAVYYCARDPRGATLYYYYYGMDVWGQGTTVTVSS

SEQ ID NO: 747 - protein, 118 aa, Artificial Sequence
  Description of Artificial Sequence: Synthetic polypeptide
QVQLVESGGGVVQPGRSLRLSCAASGFTFSSYTMHWVRQAPGKGLEWVTFISYDGNNKYYADSVKGRFTISRDNSKNTLYLQMNSLRAEDTAIYYCARTGWLGPFDYWGQGTLVTVSS

SEQ ID NO: 748 - protein, 123 aa, Artificial Sequence
  Description of Artificial Sequence: Synthetic polypeptide
QVQLQESGPGLVKPSQTLSLTCTVSGGSISSGGYYWSWIRQHPGKGLEWIGIIYYSGSTYYNPSLKSRVTISVDTSKNQFSLKLNSVTAADTAVFYCARVAIVTTIPGGMDVWGQGTTVTVSS

SEQ ID NO: 749 - protein, 120 aa, Artificial Sequence
  Description of Artificial Sequence: Synthetic polypeptide
EVQLLEQSGAELVRPGTSVKISCKASGYAFTNYWLGWVKQRPGHGLEWIGDIFPGSGNIHYNEKFKGKATLTADKSSSTAYMQLSSLTFEDSAVYFCARLRNWDEPMDYWGQGTTVTVSS

SEQ ID NO: 750 - protein, 127 aa, Artificial Sequence
  Description of Artificial Sequence: Synthetic polypeptide
EVQLLESGGGVVQPGRSLRLSCAASGFTFSSYGMHWVRQAPGKGLEWVAVISYDGSNKYYADSVKGRFTISRDNSKNTLYLQMNSLRAEDTAVYYCAKDMGWGSGWRPYYYYGMDVWGQGTTVTVSS

SEQ ID NO: 751 - protein, 116 aa, Artificial Sequence
  Description of Artificial Sequence: Synthetic polypeptide
QVQLQQSGAELVRPGTSVKVSCKASGYAFTNYLIEWVKQRPGQGLEWIGVINPGSGGTNYNEKFKGKATLTADKSSSTAYMQLSSLTSDDSAVYFCARDGPWFAYWGQGTLVTVSA

SEQ ID NO: 752 - protein, 116 aa, Artificial Sequence
  Description of Artificial Sequence: Synthetic polypeptide
QIQLVQSGPELKKPGETVKISCKASGYTFTNYGMNWVRQAPGKGLKWMGWINTYTGEPTYADDFKGRFVFSLETSASTAFLQLNNLRSEDTATYFCVRFISKGDYWGQGTSVTVSS

SEQ ID NO: 753 - protein, 114 aa, Artificial Sequence
  Description of Artificial Sequence: Synthetic polypeptide
VQLQQSDAELVKPGASVKISCKASGYTFTDHAIHWVKQNPEQGLEWIGYFSPGNDDFKYNERFKGKATLTADKSSSTAYVQLNSLTSEDSAVYFCTRSLNMAYWGQGTSVTVSS

SEQ ID NO: 754 - protein, 116 aa, Artificial Sequence
  Description of Artificial Sequence: Synthetic polypeptide
EVQLVQSGPEVKKPGASVKVSCKASGYTFTNYGMNWVRQAPGQGLEWMGWINTYTGEPTYGEDFKGRFAFSLDTSASTAYMELSSLRSEDTAVYFCARFGNYVDYWGQGSLVTVSS

SEQ ID NO: 755 - protein, 116 aa, Artificial Sequence
  Description of Artificial Sequence: Synthetic polypeptide
EVQLVQSGPGLVQPGGSVRISCAASGYTFTNYGMNWVKQAPGKGLEWMGWINTYTGESTYADSFKGRFTFSLDTSASAAYLQINSLRAEDTAVYYCARFAIKGDYWGQGTLLTVSS

SEQ ID NO: 756 - protein, 116 aa, Artificial Sequence; identical to SEQ ID NO: 755
  Description of Artificial Sequence: Synthetic polypeptide

SEQ ID NO: 757 - protein, 128 aa, Artificial Sequence
  Description of Artificial Sequence: Synthetic polypeptide
EVQLLESGGGLVQPGGSLRLSCAASGFTFSHYMMAWVRQAPGKGLEWVSRIGPSGGPTHYADSVKGRFTISRDNSKNTLYLQMNSLRAEDTAVYYCAGYDSGYDYVAVAGPAEYFQHWGQGTLVTVSS

SEQ ID NO: 758 - protein, 119 aa, Artificial Sequence
  Description of Artificial Sequence: Synthetic polypeptide
EVQLVESGGGVVQPGRSLRLSCSASGFTFSGYGLSWVRQAPGKGLEWVAMISSGGSYTYYADSVKGRFAISRDNAKNTLFLQMDSLRPEDTGVYFCARHGDDPAWFAYWGQGTPVTVSS

SEQ ID NO: 759 - protein, 118 aa, Artificial Sequence
  Description of Artificial Sequence: Synthetic polypeptide
QVQLVQSGAEVVKPGASVKISCKASGYTFTGYFMNWVKQSPGQSLEWIGRIHPYDGDTFYNQKFQGKATLTVDKSSNTAHMELLSLTSEDFAVYYCTRYDGSRAMDYWGQGTTVTVSS

SEQ ID NO: 760 - protein, 118 aa, Artificial Sequence; identical to SEQ ID NO: 759
  Description of Artificial Sequence: Synthetic polypeptide

SEQ ID NO: 761 - protein, 109 aa, Artificial Sequence
  Description of Artificial Sequence: Synthetic polypeptide
GPELVKPGASVKISCKASDYSFTGYFMNWVMQSHGKSLEWIGRIFPYNGDTFYNQKFKGRATLTVDKSSSTAHMELRSLASEDSAVYFCARGTHYFDYWGQGTTLTVSS

SEQ ID NO: 762 - protein, 115 aa, Artificial Sequence
  Description of Artificial Sequence: Synthetic polypeptide
QVQLVQSGAEVKKPGASVKVSCKASGYTFTDYEMHWVRQAPGQGLEWMGALDPKTGDTAYSQKFKGRVTLTADKSTSTAYMELSSLTSEDTAVYYCTRFYSYTYWGQGTLVTVSS

SEQ ID NO: 763 - protein, 117 aa, Artificial Sequence
  Description of Artificial Sequence: Synthetic polypeptide
EVQLVQSGAEVKKPGESLKISCKGSGYSFTSYWIAWVRQMPGKGLEWMGIIFPGDSDTRYSPSFQGQVTISADRSIRTAYLQWSSLKASDTALYYCARTREGYFDYWGQGTLVTVSS

SEQ ID NO: 764 - protein, 117 aa, Artificial Sequence
  Description of Artificial Sequence: Synthetic polypeptide
EVQLVQSGAEVKKPGESLKISCKGSGYSFTNYWIAWVRQMPGKGLEWMGIIYPGDSDTRYSPSFQGQVTISADKSIRTAYLQWSSLKASDTAMYYCARTREGYFDYWGQGTLVTVSS

SEQ ID NO: 765 - protein, 117 aa, Artificial Sequence
  Description of Artificial Sequence: Synthetic polypeptide
EVQLVQSGADVTKPGESLKISCKVSGYRFTNYWIGWMRQMSGKGLEWMGIIYPGDSDTRYSPSFQGHVTISADKSINTAYLRWSSLKASDTAIYYCARTREGFFDYWGQGTPVTVSS

SEQ ID NO: 766 - protein, 124 aa, Artificial Sequence
  Description of Artificial Sequence: Synthetic polypeptide
QVQLVESGGGVVQSGRSLRLSCAASGFTFRNYGMHWVRQAPGKGLEWVAVIWYDGSDKYYADSVRGRFTISRDNSKNTLYLQMNSLRAEDTAVYYCARDGYDILTGNPRDFDYWGQGTLVTVSS

SEQ ID NO: 767 - protein, 119 aa, Artificial Sequence
  Description of Artificial Sequence: Synthetic polypeptide
QVQLKQSGPGLVQPSQSLSITCTVSGFSLTNYGVHWVRQSPGKGLEWLGVIWSGGNTDYNTPFTSRLSINKDNSKSQVFFKMNSLQSNDTAIYYCARALTYYDYEFAYWGQGTLVTVSA

SEQ ID NO: 768 - protein, 120 aa, Artificial Sequence [sequence omitted]

SEQ ID NO: 769 - protein, 125 aa, Artificial Sequence [sequence omitted]

SEQ ID NO: 770 - protein, 121 aa, Artificial Sequence [sequence omitted]

SEQ ID NO: 771 - protein, 121 aa, Artificial Sequence
  Description of Artificial Sequence: Synthetic polypeptide
QVQLVQSGAEVKKPGSSVKVSCKASGGTFSSYAISWVRQAPGQGLEWMGSIIPIFGTVNYAQKFQGRVTITADESTSTAYMELSSLRSEDTAVYYCARDPSVNLYWYFDLWGRGTLVTVSS

SEQ ID NO: 772 - protein, 119 aa, Artificial Sequence
  Description of Artificial Sequence: Synthetic polypeptide
QVQLVQSGAEVKKPGSSVKVSCKASGGTFGSYAISWVRQAPGQGLEWMGSIIPIFGAANPAQKSQGRVTITADESTSTAYMELSSLRSEDTAVYYCAKMGRGKVAFDIWGQGTMVTVSS

SEQ ID NO: 773 - protein, 123 aa, Artificial Sequence
  Description of Artificial Sequence: Synthetic polypeptide
QVQLVQSGAEVKKPGASVKVSCKASGYAFTSYGINWVRQAPGQGLEWMGWISAYNGNTYYAQKLRGRVTMTTDTSTSTAYMELRSLRSDDTAVYYCARDLGGYGSGSVPFDPWGQGTLVTVSS

SEQ ID NO: 774 - protein, 123 aa, Artificial Sequence [sequence omitted]

SEQ ID NO: 775 - protein, 119 aa, Artificial Sequence [sequence omitted]

SEQ ID NO: 776 - protein, 118 aa, Artificial Sequence
  Description of Artificial Sequence: Synthetic polypeptide
QIQLVQSGPELKKPGETVKISCKASGYTFTEYPIHWVKQAPGKGFKWMGMIYTDIGKPTYAEEFKGRFAFSLETSASTAYLQINNLKNEDTATYFCVRDRYDSLFDYWGQGTTLTVSS

SEQ ID NO: 777 - protein, 121 aa, Artificial Sequence
  Description of Artificial Sequence: Synthetic polypeptide
EMQLVESGGGFVKPGGSLKLSCAASGFAFSHYDMSWVRQTPKQRLEWVAYIASGGDITYYADTVKGRFTISRDNAQNTLYLQMSSLKSEDTAMFYCSRSSYGNNGDALDFWGQGTSVTVSS

SEQ ID NO: 778 - protein, 119 aa, Artificial Sequence
  Description of Artificial Sequence: Synthetic polypeptide
QVQLVESGGGLVQPGGSLRLSCAASGFTFSSYAMGWVRQAPGKGLEWVSSISGSSRYIYYADSVKGRFTISRDNSKNTLYLQMNSLRAEDTAVYYCAKMDASGSYFNFWGQGTLVTVSS

SEQ ID NO: 779 - protein, 115 aa, Artificial Sequence
  Description of Artificial Sequence: Synthetic polypeptide
QVQLLQSAAEVKKPGESLKISCKGSGYSFTSYWIGWVRQMPGKGLEWMGIIYPGDSDTRYSPSFQGQVTISADKSISTAYLQWSSLKASDTAVYYCARWRDSPLWGQGTLVTVSS

SEQ ID NO: 780 - protein, 120 aa, Artificial Sequence [sequence omitted]

SEQ ID NO: 781 - protein, 120 aa, Artificial Sequence
  Description of Artificial Sequence: Synthetic polypeptide
QVQLQQSGPELVKPGASLKLSCTASGFNIKDTYIHWVKQRPEQGLEWIGRIYPTNGYTRYDPKFQDKATITADTSSNTAYLQVSRLTSEDTAVYYCSRWGGDGFYAMDYWGQGASVTVSS

SEQ ID NO: 782 - protein, 119 aa, Artificial Sequence
  Description of Artificial Sequence: Synthetic polypeptide
QVQLVESGGGLVQPGGSLRLSCAASGFTFRSYAMSWVRQAPGKGLEWVSAISGRGDNTYYADSVKGRFTISRDNSKNTLYLQMNSLRAEDTAVYYCAKMTSNAFAFDYWGQGTLVTVSS

SEQ ID NO: 783 - protein, 119 aa, Artificial Sequence [sequence omitted]

SEQ ID NO: 784 - protein, 119 aa, Artificial Sequence [sequence omitted]

SEQ ID NO: 785 - protein, 121 aa, Artificial Sequence [sequence omitted]

SEQ ID NO: 786 - protein, 118 aa, Artificial Sequence
  Description of Artificial Sequence: Synthetic polypeptide
QVQLQESGGGLVKPGGSLRLSCAASGFTFSSYWMSWVRQAPGKGLEWVANINRDGSASYYVDSVKGRFTISRDDAKNSLYLQMNSLRAEDTAVYYCARDRGVGYFDLWGRGTLVTVSS

SEQ ID NO: 787 - protein, 129 aa, Artificial Sequence
  Description of Artificial Sequence: Synthetic polypeptide
QVQLVQSGAEVKKPGESLKISCKGSGYSFTSYWIAWVRQMPGKGLEYMGLIYPGDSDTKYSPSFQGQVTISVDKSVSTAYLQWSSLKPSDSAVYFCARHDVGYCTDRTCAKWPEWLGVWGQGTLVTVSS

SEQ ID NO: 788 - protein, 119 aa, Artificial Sequence
  Description of Artificial Sequence: Synthetic polypeptide
EVQLVESGGGVVQPGRSLRLSCSTSGFTFSDYYMYWVRQAPGKGLEWVAYMSNVGAITDYPDTVKGRFTISRDNSKNTLFLQMDSLRPEDTGVYFCARGTRDGSWFAYWGQGTPVTVSS

SEQ ID NO: 789 - protein, 120 aa, Artificial Sequence
  Description of Artificial Sequence: Synthetic polypeptide
QVELVQSGAEVKKPGESLKISCKGSGYSFTSYWIGWVRQAPGKGLEWMGIIDPGDSRTRYSPSFQGQVTISADKSISTAYLQWSSLKASDTAMYYCARGQLYGGTYMDGWGQGTLVTVSS

SEQ ID NO: 790 - protein, 119 aa, Artificial Sequence
  Description of Artificial Sequence: Synthetic polypeptide
QVQLQQSGPELEKPGASVKISCKASGYSFTGYTMNWVKQSHGKSLEWIGLITPYNGASSYNQKFRGKATLTVDKSSSTAYMDLLSLTSEDSAVYFCARGGYDGRGFDYWGQGTTVTVSS

SEQ ID NO: 791 - protein, 122 aa, Artificial Sequence
  Description of Artificial Sequence: Synthetic polypeptide
QVYLVESGGGVVQPGRSLRLSCAASGITFSIYGMHWVRQAPGKGLEWVAVIWYDGSHEYYADSVKGRFTISRDNSKNTLYLLMNSLRAEDTAVYYCARDGDYYDSGSPLDYWGQGTLVTVSS

SEQ ID NO: 792 - protein, 122 aa, Artificial Sequence
  Description of Artificial Sequence: Synthetic polypeptide
QVHLVESGGGVVQPGRSLRLSCVASGITFRIYGMHWVRQAPGKGLEWVAVLWYDGSHEYYADSVKGRFTISRDNSKNTLYLQMNSLRAEDTAIYYCARDGDYYDSGSPLDYWGQGTLVTVSS

SEQ ID NO: 793 - protein, 131 aa, Artificial Sequence
  Description of Artificial Sequence: Synthetic polypeptide
EVHLVESGGGLVQPGGSLRLSCAASGFTFSRYWMSWVRQAQGKGLEWVASIKQAGSEKTYVDSVKGRFTISRDNAKNSLSLQMNSLRAEDTAVYYCAREGAYYYDSASYYPYYYYYSMDVWGQGTTVTVSS

SEQ ID NO: 794 - protein, 119 aa, Artificial Sequence
  Description of Artificial Sequence: Synthetic polypeptide
QVQLQQSGPELEKPGASVKISCKASGYSFTGYTMNWVKQSHGKSLEWIGLITPYNGASSYNQKFRGKATLTVDKSSSTAYMDLLSLTSEDSAVYFCARGGYDGRGFDYWGSGTPVTVSS

SEQ ID NO: 795 - protein, 119 aa, Artificial Sequence
  Description of Artificial Sequence: Synthetic polypeptide
EVQLQESGPELVKPGASVKMSCKASGYTFPSYVLHWVKQKPGQGLEWIGYINPYNDGTQYNEKFKGKATLTSDKSSSTAYMELSRLTSEDSAVYYCARGFGGSYGFAYWGQGTLITVSA

SEQ ID NO: 796 - protein, 119 aa, Artificial Sequence
  Description of Artificial Sequence: Synthetic polypeptide
QVQLQQSGAEVKKFGASVKVSCEASGYTFPSYVLHWVKQAPGQGLEWIGYINPYNDGTQTNKKFKGKATLTRDTSINTAYMELSRLRSDDTAVYYCARGFGGSYGFAYNGQGTLVTVSS

SEQ ID NO: 797 - protein, 117 aa, Artificial Sequence
  Description of Artificial Sequence: Synthetic polypeptide
QAQLQVSGAEVVKPGASVKMSCKASGYTFTSYNMHWVKQTPGQGLEWIGYIYPGNGATNYNQKFQGKATLTADTSSSTAYMQISSLTSEDSAVYFCARGDSVPFAYWGQGTLVTVSA

SEQ ID NO: 798 - protein, 118 aa, Artificial Sequence
  Description of Artificial Sequence: Synthetic polypeptide
QVQLQQSGAELMKPGASVKISCKATGYTFSAYWIEWVKQRPGHGLEWIGEILPGSNNSRYNEKFKGKATFTADTSSNTAYMQLSSLTSEDSAVYYCSRSYDFAWFAYWGQGTPVTVSA

SEQ ID NO: 799 - protein, 118 aa, Artificial Sequence
  Description of Artificial Sequence: Synthetic polypeptide
QVQLVQSGAEVKKPGASVKVSCKASGYTFSAYWIEWVRQAPGKGLEWVGEILPGSNNSRYNEKFKGRVTVTRDTSTNTAYMELSSLRSEDTAVYYCARSYDFAWFAYWGQGTLVTVSS

SEQ ID NO: 800 - protein, 123 aa, Artificial Sequence
  Description of Artificial Sequence: Synthetic polypeptide
QVQLVQSGAEVKKPGSSVKVSCKTSGDTFSTYAISWVRQAPGQGLEWMGGIIPIFGKAHYAQKFQGRVTITADESTSTAYMELSSLRSEDTAVYFCARKFHFVSGSPFGMDVWGQGTTVTVSS

SEQ ID NO: 801 - protein, 121 aa, Artificial Sequence
  Description of Artificial Sequence: Synthetic polypeptide
EVQLVESGGGLVQPGGSLRLSCAASGFTFSRYWMSWVRQAPGKGLEWVANIKQDGSEKYYVDSVKGRFTISRDNAKNSLYLQMNSLRAEDTAVYYCAREGGWFGELAFDYWGQGTLVTVSS

SEQ ID NO: 802 - protein, 118 aa, Artificial Sequence [sequence omitted]

SEQ ID NO: 803 - protein, 120 aa, Artificial Sequence
  Description of Artificial Sequence: Synthetic polypeptide
EVQLLESGGGLVQPGGSLRLSCAASGFTFSSYIMMWVRQAPGKGLEWVSSIYPSGGITFYADTVKGRFTISRDNSKNTLYLQMNSLRAEDTAVYYCARIKLGTVTTVDYWGQGTLVTVSS

SEQ ID NO: 804 - protein, 115 aa, Artificial Sequence
  Description of Artificial Sequence: Synthetic polypeptide
EVQLVQSGPEVKKPGATVKISCKTSGYTFTEYTIHWVKQAPGKGLEWIGNINPNNGGTTYNQKFEDKATLTVDKSTDTAYMELSSLRSEDTAVYYCAAGWNFDYWGQGTLLTVSS

SEQ ID NO: 805 - protein, 121 aa, Artificial Sequence
  Description of Artificial Sequence: Synthetic polypeptide
QVQLVESGGGLVKPGESLRLSCAASGFTFSDYYMYWVRQAPGKGLEWVAIISDGGYYTYYSDIIKGRFTISRDNAKNSLYLQMNSLKAEDTAVYYCARGFPLLRHGAMDYWGQGTLVTVSS

SEQ ID NO: 806 - protein, 121 aa, Artificial Sequence
  Description of Artificial Sequence: Synthetic polypeptide
QEQLVESGGRLVTPGGSLTLSCKASGFDFSAYYMSWVRQAPGKGLEWIATIYPSSGKTYYATWVNGRFTISSDNAQNTVDLQMNSLTAADRATYFCARDSYADDGALFNIWGPGTLVTISS

SEQ ID NO: 807 - protein, 119 aa, Artificial Sequence
  Description of Artificial Sequence: Synthetic polypeptide
EVKLVESGGGLVKPGGSLKLSCAASGFTFSSYAMSWVRQIPEKRLEWVASISRGGTTYYPDSVKGRFTISRDNVRNILYLQMSSLRSEDTAMYYCGRYDYDGYYAMDYWGQGTSVTVSS

SEQ ID NO: 808 - protein, 117 aa, Artificial Sequence
  Description of Artificial Sequence: Synthetic polypeptide
QSLEESGGRLVTPGTPLTLTCTVSGIDLNSHWMSWVRQAPGKGLEWIGIIAASGSTYYANWAKGRFTISKTSTTVDLRIASPTTEDTATYFCARDYGDYRLVTFNIWGPGTLVTVSS

SEQ ID NO: 809 - protein, 116 aa, Artificial Sequence
  Description of Artificial Sequence: Synthetic polypeptide
QSVKESEGDLVTPAGNLTLTCTASGSDINDYPISWVRQAPGKGLEWIGFINSGGSTWYASWVKGRFTISRTSTTVDLKMTSLTTDDTATYFCARGYSTYYCDFNIWGPGTLVTISS

SEQ ID NO: 810 - protein, 115 aa, Artificial Sequence
  Description of Artificial Sequence: Synthetic polypeptide
QVQLVQSGAEVVKPGASVKISCKASGYTFTDHAIHWVKQNPGQRLEWIGYFSPGNDDFKYNERFKGKATLTADTSASTAYVELSSLRSEDTAVYFCTRSLNMAYWGQGTLVTVSS

SEQ ID NO: 811 - protein, 119 aa, Artificial Sequence
  Description of Artificial Sequence: Synthetic polypeptide
  MOD_RES (68)..(68): Any amino acid
QIQLVQSGPELKKPGETVKISCKASGYTFTNFGMNWVKQGPGEGLKWMGWINTNTGEPRYAEEFKGRXAFSLETTASTAYLQINNLKNEDTATYFCARDWDGAYFFDYWGQGTTLTVSS

SEQ ID NO: 812 - protein, 117 aa, Artificial Sequence
  Description of Artificial Sequence: Synthetic polypeptide
QVQLQQSRPELVKPGASVKMSCKASGYTFTDYVISWVKQRTGQGLEWIGEIYPGSNSIYYNEKFKGRATLTADKSSSTAYMQLSSLTSEDSAVYFCAMGGNYGFDYWGQGTTLTVSS

SEQ ID NO: 813 - protein, 122 aa, Artificial Sequence
  Description of Artificial Sequence: Synthetic polypeptide
  MOD_RES (97)..(97): Any amino acid
EVQLVESGGGLVQPKGSLKLSCAASGFTFNTYAMNWVRQAPGKGLEWVARIRSKSNNYATYYADSVKDRFTISRDDSQSMLYLQMNNLKTEDTAMYXCVRQWDYDVRAMNYWGQGTSVTVSS

SEQ ID NO: 814 - protein, 121 aa, Artificial Sequence
  Description of Artificial Sequence: Synthetic polypeptide
QVQLQQSGSELKKPGASVKVSCKASGYTFTNYGMNWVKQAPGQGLKWMGWINTYTGEPTYTDDFKGRFAFSLDTSVSTAYLQISSLKADDTAVYFCARGGFGSSYWYFDVWGQGSLVTVSS

SEQ ID NO: 815 - protein, 126 aa, Artificial Sequence
  Description of Artificial Sequence: Synthetic polypeptide
QAQVVESGGGVVQSGRSLRLSCAASGFAFSSYGMHWVRQAPGKGLEWVAVIWYDGSNKYYADSVRGRFTISRDNSENTLYLQMNSLRAEDTAVYYCARDHYGSGVHHYFYYGLDVWGQGTTVTVSS

SEQ ID NO: 816 - protein, 117 aa, Artificial Sequence
  Description of Artificial Sequence: Synthetic polypeptide
EVQLVQSGGGLVKPGGSLRLSCAASGFTFSSYSMNWVRQAPGKGLEWVSSISSSSSYIYYADSVKGRFTISRDNAKNSLYLQMNSLRAEDTAVYYCARVTDAFDIWGQGTMVTVSSA

SEQ ID NO: 817 - protein, 117 aa, Artificial Sequence
  Description of Artificial Sequence: Synthetic polypeptide
EVQLVESGGGLVQPGGSLRLSCAASGFTFSSYGMSWVRQAPGKGLEWVATITSGGSYTYYVDSVKGRFTISRDNAKNTLYLQMNSLRAEDTAVYYCVRIGEDALDYWGQGTLVTVSS

SEQ ID NO: 818 - protein, 118 aa, Artificial Sequence
  Description of Artificial Sequence: Synthetic polypeptide
KVQLQQSGTELVKPGASVKVSCKASGYIFTEYIIHWVKQRSGQGLEWIGWLYPESNIIKYNEKFKDKATLTADKSSSTVYMELSRLTSEDSAVYFCTRHDGTNFDYWGQGTTLTVSSA

SEQ ID NO: 819 - protein, 106 aa, Artificial Sequence [sequence omitted]

SEQ ID NO: 820 - protein, 107 aa, Artificial Sequence
  Description of Artificial Sequence: Synthetic polypeptide
EIVLTQSPGTLSLSPGERATLSCRASQSVSSTYLAWYQQKPGQAPRLLIYGASSRATGIPDRFSGSGSGTDFTLTISRLEPEDFAVYYCQHYDNSQTFGQGTKVEIK

SEQ ID NO: 821 - protein, 106 aa, Artificial Sequence
  Description of Artificial Sequence: Synthetic polypeptide
ENVLTQSPSSMSASVGDRVNIACSASSSVSYMHWFQQKPGKSPKLWIYSTSNLASGVPSRFSGSGSGTDYSLTISSMQPEDAATYYCQQRSSYPLTFGGGTKLEIK

SEQ ID NO: 822 - protein, 111 aa, Artificial Sequence
  Description of Artificial Sequence: Synthetic polypeptide
DIQLTQSPSSLSASVGDRVTITCRAGESVDIFGVGFLHWYQQKPGKAPKLLIYRASNLESGVPSRFSGSGSRTDFTLTISSLQPEDFATYYCQQTNEDPYTFGQGTKVEIK

SEQ ID NO: 823 - protein, 111 aa, Artificial Sequence; identical to SEQ ID NO: 822
  Description of Artificial Sequence: Synthetic polypeptide

SEQ ID NO: 824 - protein, 106 aa, Artificial Sequence
  Description of Artificial Sequence: Synthetic polypeptide
DIQLTQSPSSLSASVGDRVTITCKASQDVGTSVAWYQQKPGKAPKLLIYWTSTRHTGVPSRFSGSGSGTDFTFTISSLQPEDIATYYCQQYSLYRSFGQGTKVEIK

SEQ ID NO: 825 - protein, 107 aa, Artificial Sequence
  Description of Artificial Sequence: Synthetic polypeptide
QTVLSQSPAILSASPGEKVTMTCRASSSVTYIHWYQQKPGSSPKSWIYATSNLASGVPARFSGSGSGTSYSLTISRVEAEDAATYYCQHWSSKPPTFGGGTKLEIKR

SEQ ID NO: 826 - protein, 116 aa, Artificial Sequence
  Description of Artificial Sequence: Synthetic polypeptide
QAVLTQPASLSASPGASASLTCTLRRGINVGAYSIYWYQQKPGSPPQYLLRYKSDSDKQQGSGVSSRFSASKDASANAGILLISGLQSEDEADYYCMIWHSGASAVFGGGTKLTVL

SEQ ID NO: 827 - protein, 111 aa, Artificial Sequence
  Description of Artificial Sequence: Synthetic polypeptide
DIQLTQSPASLAVSLGQRATISCKASQSVDYDGDSYLNWYQQIPGQPPKLLIYDASNLVSGIPPRFSGSGSGTDFTLNIHPVEKVDAATYHCQQSTEDPWTFGGGTKLEIK

SEQ ID NO: 828 - protein, 107 aa, Artificial Sequence
  Description of Artificial Sequence: Synthetic polypeptide
EIVLTQSPATLSLSPGERATLSCRASQSVSSYLAWYQQKPGQAPRLLIYDASNRATGIPARFSGSGSGTDFTLTISSLEPEDFAVYYCQQRSNWPITFGQGTRLEIK

SEQ ID NO: 829 - protein, 106 aa, Artificial Sequence [sequence omitted]

SEQ ID NO: 830 - protein, 112 aa, Artificial Sequence
  Description of Artificial Sequence: Synthetic polypeptide
DIVMTQTPLSLPVTPGEPASISCRSSKSLLHSNGITYLYWYLQKPGQSPQLLIYQMSNLVSGVPDRFSGSGSGTDFTLKISRVEAEDVGVYYCAQNLELPYTFGGGTKVEIK

SEQ ID NO: 831 - protein, 106 aa, Artificial Sequence [sequence omitted]

SEQ ID NO: 832 - protein, 106 aa, Artificial Sequence [sequence omitted]

SEQ ID NO: 833 - protein, 106 aa, Artificial Sequence [sequence omitted]

SEQ ID NO: 834 - protein, 111 aa, Artificial Sequence [sequence omitted]

SEQ ID NO: 835 - protein, 107 aa, Artificial Sequence [sequence omitted]

SEQ ID NO: 836 - protein, 111 aa, Artificial Sequence
  Description of Artificial Sequence: Synthetic polypeptide
DIVLTQSPASLAVSLGQRATISCRASKSVSTSGYSFMHWYQQKPGQPPKLLIYLASNLESGVPARFSGSGSGTDFTLNIHPVEEEDAATYYCQHSREVPWTFGGGTKLEIK

SEQ ID NO: 837 - protein, 111 aa, Artificial Sequence
  Description of Artificial Sequence: Synthetic polypeptide
DIVLTQSPASLTVSLGQKTTISCRASKSVSTSGYSFMHWYQLKPGQSPKLLIYLASDLPSGVPARFSGSGSGTDFTLKIHPVEEEDAATYYCQHSREIPYTFGGGTKLEIT

SEQ ID NO: 838 - protein, 107 aa, Artificial Sequence
  Description of Artificial Sequence: Synthetic polypeptide
EIVLTQSPATLSLSPGERATLSCRASQSVSSYLAWYQQKPGQAPRLLIYDASNRATGIPARFSGSGSGTDFTLTISSLEPEDFAVYYCQQRTNWPLTFGGGTKVEIK

SEQ ID NO: 839 - protein, 107 aa, Artificial Sequence
  Description of Artificial Sequence: Synthetic polypeptide
AIQLTQSPSSLSASVGDRVTITCRASQGISSALAWYQQKPGKAPKFLIYDASSLESGVPSRFSGSGSGTDFTLTISSLQPEDFATYYCQQFNSYPFTFGPGTKVDIK

SEQ ID NO: 840 - protein, 107 aa, Artificial Sequence
  Description of Artificial Sequence: Synthetic polypeptide
DIQMTQSPSSLSASVGDRVTITCRASQGISSWLAWYQQKPEKAPKSLIYAASSLQSGVPSRFSGSGSGTDFTLTISSLQPEDFATYYCQQYNSYPLTFGGGTKVEIK

SEQ ID NO: 841 - protein, 107 aa, Artificial Sequence; identical to SEQ ID NO: 840
  Description of Artificial Sequence: Synthetic polypeptide

SEQ ID NO: 842 - protein, 107 aa, Artificial Sequence
  Description of Artificial Sequence: Synthetic polypeptide
EIVLTQSPATLSLSPGERATLSCRASQSVSSYLAWYQQKPGQAPRLLIFDASNRATGIPARFSGSGSGTDFTLTISSLEPEDFAVYYCQQRSNWPLTFGGGTKVEIK

SEQ ID NO: 843 - protein, 107 aa, Artificial Sequence
  Description of Artificial Sequence: Synthetic polypeptide
DIQMTQSPSSVSASVGDRVTITCRASQGINTWLAWYQQKPGKAPKLLIYAASSLKSGVPSRFSGSGSGTDFTLTISSLQPEDFATYYCQQANSFPLTFGGGTKVEIK

SEQ ID NO: 844 - protein, 108 aa, Artificial Sequence [sequence omitted]

SEQ ID NO: 845 - protein, 113 aa, Artificial Sequence [sequence omitted]

SEQ ID NO: 846 - protein, 107 aa, Artificial Sequence
  Description of Artificial Sequence: Synthetic polypeptide
DIQMTQSPSSLSASVGDRVTITCRASQSINSYLDWYQQKPGKAPKLLIYAASSLQSGVPSRFSGSGSGTDFTLTISSLQPEDFATYYCQQYYSTPFTFGPGTKVEIK

SEQ ID NO: 847 - protein, 108 aa, Artificial Sequence
  Description of Artificial Sequence: Synthetic polypeptide
EIVLTQSPGTLSLSPGERATLSCRASQSVGSSYLAWYQQKPGQAPRLLIYGAFSRATGIPDRFSGSGSGTDFTLTISRLEPEDFAVYYCQQYGSSPWTFGQGTKVEIK

SEQ ID NO: 848 - protein, 107 aa, Artificial Sequence
  Description of Artificial Sequence: Synthetic polypeptide
EIVLTQSPDFQSVTPKEKVTITCRASQSIGISLHWYQQKPDQSPKLLIKYASQSFSGVPSRFSGSGSGTDFTLTINSLEAEDAATYYCHQSRSFPWTFGQGTKVEIK

SEQ ID NO: 849 - protein, 113 aa, Artificial Sequence
  Description of Artificial Sequence: Synthetic polypeptide
ELVMTQSPSSLTVTAGEKVTMSCKSSQSLLNSGNQKNYLTWYQQKPGQPPKLLIYWASTRESGVPDRFTGSGSGTDFTLTISSVQAEDLAVYYCQNDYSYPLTFGAGTKLEIK

SEQ ID NO: 850 - protein, 107 aa, Artificial Sequence
  Description of Artificial Sequence: Synthetic polypeptide
ELQMTQSPSSLSASVGDRVTITCRTSQSISSYLNWYQQKPGQPPKLLIYWASTRESGVPDRFSGSGSGTDFTLTISSLQPEDSATYYCQQSYDIPYTFGQGTKLEIK

SEQ ID NO: 851 - protein, 107 aa, Artificial Sequence
  Description of Artificial Sequence: Synthetic polypeptide
NIVMTQSPKSMSMSVGERVTLTCKASENVVTYVSWYQQKPEQSPKLLIYGASNRYTGVPDRFTGSGSATDFTLTISSVQAEDLADYHCGQGYSYPYTFGGGTKLEIK

SEQ ID NO: 852 - protein, 106 aa, Artificial Sequence
  Description of Artificial Sequence: Synthetic polypeptide
QILLTQSPAIMSASPGEKVTMTCSASSSVSYMLWYQQKPGSSPKPWIFDTSNLASGFPARFSGSGSGTSYSLIISSMEAEDAATYYCHQRSGYPYTFGGGTKLEIK

SEQ ID NO: 853 - protein, 113 aa, Artificial Sequence
  Description of Artificial Sequence: Synthetic polypeptide
DIVMTQSPDSLAVSLGERATINCKSSQSVLYSSNNKNYLAWYQQKPGQPPKLLIYWASTRESGVPDRFSGSGSGTDFTLTISSLQAEDVAVYYCQQYYSYPLTFGGGTKVKES

SEQ ID NO: 854 - protein, 112 aa, Artificial Sequence
  Description of Artificial Sequence: Synthetic polypeptide
DIVMTQSPLSLPVTPGEPASISCRSSINKKGSNGITYLYWYLQKPGQSPQLLIYQMSNLASGVPDRFSGSGSGTDFTLKISRVEAEDVGVYYCAQNLEIPRTFGQGTKVEIK

SEQ ID NO: 855 - protein, 112 aa, Artificial Sequence
  Description of Artificial Sequence: Synthetic polypeptide
DIQMTQSPSSLSASVGDRVTITCRSTKSLLHSNGITYLYWYQQKPGKAPKLLIYQMSNLASGVPSRFSSSGSGTDFTLTISSLQPEDFATYYCAQNLEIPRTFGQGTKVEIK

SEQ ID NO: 856 - protein, 112 aa, Artificial Sequence
  Description of Artificial Sequence: Synthetic polypeptide
DIQMTQSPSSLSASVGDRVTITCRSTKSLLHSNGITYLYWYQQKPGKAPKLLIYQMSNLASGVPSRFSSSGSGTDFTLTISSLQPEDFATYYCAQNLEIPRTFGQGTKVELK

SEQ ID NO: 857 - protein, 107 aa, Artificial Sequence
  Description of Artificial Sequence: Synthetic polypeptide
DIQMTQSPSSLSASVGDRVTITCRASQSISTWLAWYQQKPGKAPKLLIYKASNLHTGVPSRFSGSGSGTEFSLTISGLQPDDFATYYCQQYNSYSRTFGQGTKVEIK

SEQ ID NO: 858 - protein, 110 aa, Artificial Sequence
  Description of Artificial Sequence: Synthetic polypeptide
DIQLTQSPSSLSASVGDRVTITCSVSSSISSNNLHWYQQKPGKAPKPWIYGTSNLASGVPSRFSGSGSGTDYTFTISSLQPEDIATYYCQQWSSYPYMYTFGQGTKVEIK

SEQ ID NO: 859 - protein, 111 aa, Artificial Sequence
  Description of Artificial Sequence: Synthetic polypeptide
DIVLTQSPLSLAVSLGQPAIISCKASQSVSFAGTSLMHWYHQKPGQQPRLLIYRASNLEAGVPDRFSGSGSKTDFTLNISPVEAEDAATYYCQQSREYPYTFGGGTKLEIK

SEQ ID NO: 860 - protein, 111 aa, Artificial Sequence
  Description of Artificial Sequence: Synthetic polypeptide
DIVLTQSPLSLAVSLGQPAIISCKASQSVSFAGTSLMHWYHQKPGQQPRLLIYRASNLEAGVPDRFSGSGSKTDFTLTISPVEAEDAATYYCQQSREYPYTFGGGTKLEIK

SEQ ID NO: 861 - protein, 100 aa, Artificial Sequence
  Description of Artificial Sequence: Synthetic polypeptide
PASLSASVGETVTITCRTSENIFSYLAWYQQKQGISPQLLVYNAKTLAEGVPSRFSGSGSGTQFSLKINSLQPEDFGSYYCQHHYAFPWTFGGGSKLEIK

SEQ ID NO: 862 - protein, 112 aa, Artificial Sequence
  Description of Artificial Sequence: Synthetic polypeptide
DVVMTQSPLSLPVTPGEPASISCRSSQSLVHSNGNTYLHWYLQKPGQSPQLLIYKVSNRFSGVPDRFSGSGSGTDFTLKISRVEAEDVGVYYCSQNTHVPPTFGQGTKLEIK

SEQ ID NO: 863 - protein, 107 aa, Artificial Sequence
  Description of Artificial Sequence: Synthetic polypeptide
EIVLTQSPGTLSLSPGERATLSCRAVQSVSSSYLAWYQQKPGQAPRLLIYGASSRATGIPDRFSGSGSGTDFTLTISRLEPEDFAVYYCQQYGSSPTFGGGTKVEIK

SEQ ID NO: 864 - protein, 107 aa, Artificial Sequence
  Description of Artificial Sequence: Synthetic polypeptide
EIVLTQSPGTLSLSPGERATLSCRASQSVSSSYLAWYQQKPGQAPRLLIYGASSRATGIPDRFSGSGSGTDFTLTISRLEPEDFAVYYCQQYGSSPTFGGGTKVEIK

SEQ ID NO: 865 - protein, 107 aa, Artificial Sequence
  Description of Artificial Sequence: Synthetic polypeptide
EILLTQSPGTLSLSPGERATLSCRASQSVSSSYLAWYQQKPGQAPRLLIYGASSRATGIPDRFSGSGSGTDFTLTISRLEPEDFAVYYCQQYGSSPTFGQGTKVEIK

SEQ ID NO: 866 - protein, 112 aa, Artificial Sequence
  Description of Artificial Sequence: Synthetic polypeptide
DTVMTQTPLSSHVTLGQPASISCRSSQSLVHSDGNTYLSWLQQRPGQPPRLLIYRISRRFSGVPDRFSGSGAGTDFTLEISRVEAEDVGVYYCMQSTHVPRTFGQGTKVEIK

SEQ ID NO: 867 - protein, 107 aa, Artificial Sequence
  Description of Artificial Sequence: Synthetic polypeptide
DILLTQSPVILSVSPGERVSFSCRASQSIGTNIHWYQQRTNGSPRLLIKYASESISGIPSRFSGSGSGTDFTLSINSVESEDIADYYCQQNNNWPTTFGAGTKLELK

SEQ ID NO: 868 - protein, 106 aa, Artificial Sequence [sequence omitted]

SEQ ID NO: 869 - protein, 107 aa, Artificial Sequence [sequence omitted]

SEQ ID NO: 870 - protein, 107 aa, Artificial Sequence [sequence omitted]

SEQ ID NO: 871 - protein, 107 aa, Artificial Sequence
  Description of Artificial Sequence: Synthetic polypeptide
DIQMTQSPSTLSASVGDRVTITCRASQSISSWWAWYQQKPGKAPKLLIYDASSLESGVPSRFSGSGSGTEFTLTISSLQPDDFATYYCQQYHAHPTTFGGGTKVEIK

SEQ ID NO: 872 - protein, 113 aa, Artificial Sequence
  Description of Artificial Sequence: Synthetic polypeptide
DIVMTQSPDSLAVSLGERATINCKSSQSVLYSPNNKNYLAWYQQKPGQPPKLLIYWASTRESGVPDRFSGSGSGTDFTLTISSLQAEDVAVYYCQQYYGSPITFGGGTKVEIK

SEQ ID NO: 873 - protein, 108 aa, Artificial Sequence
  Description of Artificial Sequence: Synthetic polypeptide
EIVMTQSPATLSVSPGERATLSCRASQSVSSNLAWYQQKPGQAPRLLIYGASTRATGIPARFSGSGSGTEFTLTISSLQSEDFAVYYCQDYRTWPRRVFGGGTKVEIK

SEQ ID NO: 874 - protein, 112 aa, Artificial Sequence [sequence omitted]

SEQ ID NO: 875 - protein, 107 aa, Artificial Sequence [sequence omitted]

SEQ ID NO: 876 - protein, 112 aa, Artificial Sequence
  Description of Artificial Sequence: Synthetic polypeptide
DVVMTQTPLSLPVSLGDQASISCRSSQSLVHSNGNTYLHWYLQKPGQSPKLLIYKVSNRFSGVPDRFSGSGSGTDFTLKISRVEAEDLGVYFCSQSTHVPWTFGGGTKLEIK

SEQ ID NO: 877 - protein, 111 aa, Artificial Sequence
  Description of Artificial Sequence: Synthetic polypeptide
DVVMTQTPLSLPVSLGDQASISCRSSQSLVHSNGNTYLHWYLQKPGQSPKLLIYKVSNRFSGVPDRFSGSGSGTDFTLKISRVEAEDLGVYFCSQSTHVLTFGSGTKLEIK

SEQ ID NO: 878 - protein, 102 aa, Artificial Sequence
  Description of Artificial Sequence: Synthetic polypeptide
QSPSFLSAFVGDRITITCRASPGIRNYLAWYQQKPGKAPKLLIYAASTLQSGVPSRFSGSGSGTDFTLTISSLQPEDFATYYCQQYNSYPLSFGGGTKVEIK

SEQ ID NO: 879 - protein, 110 aa, Artificial Sequence
  Description of Artificial Sequence: Synthetic polypeptide
QAVVTQEPSFSVSPGGTVTLTCGLSSGSVSTSYYPSWYQQTPGQAPRTLIYSTNTRSSGVPDRFSGSILGNKAALTITGAQADDESDYYCVLYMGSGQYVFGGGTKLTVL

SEQ ID NO: 880 - protein, 107 aa, Artificial Sequence [sequence omitted]

SEQ ID NO: 881 - protein, 107 aa, Artificial Sequence
  Description of Artificial Sequence: Synthetic polypeptide
DIVMTQSHKFMSTSVGDRVSITCKASQDVNTAVAWYQQKPGHSPKLLIYSASFRYTGVPDRFTGSRSGTDFTFTISSVQAEDLAVYYCQQHYTTPPTFGGGTKVEIK

SEQ ID NO: 882 - protein, 111 aa, Artificial Sequence
  Description of Artificial Sequence: Synthetic polypeptide
QSVLTQPPSVSGAPGQRVTISCTGSSSNIGAGYGVHWYQQLPGTAPKLLIYGNTNRPSGVPDRFSGFKSGTSASLAITGLQAEDEADYYCQFYDSSLSGWVFGGGTKLTVL

SEQ ID NO: 883 - protein, 107 aa, Artificial Sequence [sequence omitted]

SEQ ID NO: 884 - protein, 111 aa, Artificial Sequence [sequence omitted]

SEQ ID NO: 885 - protein, 107 aa, Artificial Sequence [sequence omitted]

SEQ ID NO: 886 - protein, 111 aa, Artificial Sequence
  Description of Artificial Sequence: Synthetic polypeptide
QSALTQPASVSGSPGQSITISCTGTSSDVGGYNFVSWYQQHPGKAPKLMIYDVSDRPSGVSDRFSGSKSGNTASLIISGLQADDEADYYCSSYGSSSTHVIFGGGTKVTVL

SEQ ID NO: 887 - protein, 16 aa, Artificial Sequence
  Description of Artificial Sequence: Synthetic peptide
QSVLTQPPSVSAAPGQ

SEQ ID NO: 888 - protein, 112 aa, Artificial Sequence
  Description of Artificial Sequence: Synthetic polypeptide
DIQMTQSPSSLSASVGDRVTITCRSSQRIVHSNGNTYLEWYQQTPGKAPKLLIYKVSNRFSGVPSRFSGSGSGTDFTFTISSLQPEDIATYYCFQGSHVPFTFGQGTKLQIT

SEQ ID NO: 889 - protein, 111 aa, Artificial Sequence
  Description of Artificial Sequence: Synthetic polypeptide
DIALTQPASVSGSPGQSITISCTGTSSDIGGYNSVSWYQQHPGKAPKLMIYGVNNRPSGVSNRFSGSKSGNTASLTISGLQAEDEADYYCSSYDIESATPVFGGGTKLTVL

SEQ ID NO: 890 - protein, 106 aa, Artificial Sequence
  Description of Artificial Sequence: Synthetic polypeptide
DIELTQSPAIMSASPGEKVTMTCSASSSVSYMHWYQQKSGTSPKRWIYDTSKLASGVPGRFSGSGSGNSYSLTISSVEAEDDATYYCQQWSGYPLTFGAGTKLEIK

SEQ ID NO: 891 - protein, 107 aa, Artificial Sequence
  Description of Artificial Sequence: Synthetic polypeptide
EIVLTQSPATLSLSPGERATLSCRASQSVSSYLAWYQQKPGQAPRLLIYDASNRATGIPARFSGSGSGTDFTLTISSLEPEDFAVYYCQQRSNWPLTFGGGTKVEIK

SEQ ID NO: 892 - protein, 107 aa, Artificial Sequence; identical to SEQ ID NO: 891
  Description of Artificial Sequence: Synthetic polypeptide

SEQ ID NO: 893 - protein, 108 aa, Artificial Sequence
  Description of Artificial Sequence: Synthetic polypeptide
EIVLTQSPGTLSLSPGERATLSCRASQSVSSSYLAWYQQKPGQAPRLLIYGASSRATGIPDRFSGSGSGTDFTLTISRLEPEDFAVYYCQQYGSSQYTFGQGTKLEIK

SEQ ID NO: 894 - protein, 106 aa, Artificial Sequence
  Description of Artificial Sequence: Synthetic polypeptide
DIELTQSPAIMSASPGEKVTMTCSASSSVSYMHWYQQKSGTSPKRWIYDTSKLASGVPGRFSGSGSGNSYSLTISSVEAEDDATYYCQQWSKHPLTFGSGTKVEIK

SEQ ID NO: 895 - protein, 108 aa, Artificial Sequence
  Description of Artificial Sequence: Synthetic polypeptide
DIVMTQSPAIMSASPGEKVTMTCSASSSVSSSYLYWYQQKPGSSPKLWIYSTSNLASGVPARFSGSGSGTSYSLTISSMEAEDAASYFCHQWNRYPYTFGGGTKLEIK

SEQ ID NO: 896 - protein, 108 aa, Artificial Sequence
  Description of Artificial Sequence: Synthetic polypeptide
DIQLTQSPSSLSASVGDRVTMTCSASSSVSSSYLYWYQQKPGKAPKLWIYSTSNLASGVPARFSGSGSGTDFTLTISSLQPEDSASYFCHQWNRYPYTFGGGTRLEIK

SEQ ID NO: 897 - protein, 106 aa, Artificial Sequence
  Description of Artificial Sequence: Synthetic polypeptide
EIVLTQSPATMSASPGERVTITCSAHSSVSFMHWFQQKPGTSPKLWIYSTSSLASGVPARFGGSGSGTSYSLTISSMEAEDAATYYCQQRSSFPLTFGAGTKLELK

SEQ ID NO: 898 - protein, 113 aa, Artificial Sequence
  Description of Artificial Sequence: Synthetic polypeptide
DIVMSQSPSSLAVSVGEKVTMSCKSSQSLLYSSNQKIYLAWYQQKPGQSPKLLIYWASTRESGVPDRFTGGGSGTDFTLTISSVKAEDLAVYYCQQYYRYPRTFGGGTKLEIK

SEQ ID NO: 899 - protein, 113 aa, Artificial Sequence
  Description of Artificial Sequence: Synthetic polypeptide
DIQMTQSPSSLSASVGDRVTITCKSSQSLLYSSNQKIYLAWYQQKPGKAPKLLIYWASTRESGVPSRFSGSGSGTDFTFTISSLQPEDIATYYCQQYYRYPRTFGQGTKVEIK

SEQ ID NO: 900 - protein, 106 aa, Artificial Sequence
  Description of Artificial Sequence: Synthetic polypeptide
EIVLTQSPATLSLSPGERATLSCRASQSVSSYLAWYQQKPGQAPRLLIYDASNRATGIPARFSGSGSGTDFTLTISSLEPEDFAVYYCQQRSNWPTFGQGTKVEIK

SEQ ID NO: 901 - protein, 108 aa, Artificial Sequence
  Description of Artificial Sequence: Synthetic polypeptide
EIVLTQSPGTLSLSPGERATLSCRASQRVSSSYLAWYQQKPGQAPRLLIYDASSRATGIPDRFSGSGSGTDFTLTISRLEPEDFAVYYCQQYGSLPWTFGQGTKVEIK

SEQ ID NO: 902 - protein, 107 aa, Artificial Sequence [sequence omitted]

SEQ ID NO: 903 - protein, 110 aa, Artificial Sequence
  Description of Artificial Sequence: Synthetic polypeptide
QSALTQPASVSGSPGQSITISCTGTSSDVGGYNYVSWYQQHPGKAPKLMIYDVSNRPSGVSNRFSGSKSGNTASLTISGLQAEDEADYYCSSYTSSSTRVFGTGTKVTVL

SEQ ID NO: 904 - protein, 107 aa, Artificial Sequence
  Description of Artificial Sequence: Synthetic polypeptide
DIQMTQSPSSLSTSVGDRVTLTCKASQDVGTAVDWYQQKPGPSPKLLIYWASTRHTGIPSRFSGSGSGTDFTLTISSLQPEDFADYYCQQYNSYPLTFGPGTKVDIK

SEQ ID NO: 905 - protein, 107 aa, Artificial Sequence
  Description of Artificial Sequence: Synthetic polypeptide
DIQMTQSPSSLSASVGDRVTITCKASQNVDTNVAWYQQKPGQAPKSLIYSASYRYSDVPSRFSGSASGTDFTLTISSVQSEDFATYYCQQYDSYPYTFGGGTKLEIK

SEQ ID NO: 906 - protein, 112 aa, Artificial Sequence
  Description of Artificial Sequence: Synthetic polypeptide
ELVLTQSPSVSAALGSPAKITCTLSSAHKTDTIDWYQQLQGEAPRYLMQVQSDGSYTKRPGVPDRFSGSSSGADRYLIIPSVQADDEADYYCGADYIGGYVFGGGTQLTVTG

SEQ ID NO: 907 - protein, 107 aa, Artificial Sequence
  Description of Artificial Sequence: Synthetic polypeptide
DIKMTQSPSSMYASLGERVTITCKASPDINSYLSWFQQKPGKSPKTLIYRANRLVDGVPSRFSGGGSGQDYSLTINSLEYEDMGIYYCLQYDEFPYTFGGGTKLEMK

SEQ ID NO: 908 - protein, 108 aa, Artificial Sequence
  Description of Artificial Sequence: Synthetic polypeptide
ELVMTQTPSSVSAAVGGTVTINCQASQSIGSYLAWYQQKPGQPPKLLIYYASNLASGVPSRFSGSGSGTEYTLTISGVQREDAATYYCLGSLSNSDNVFGGGTELEIL

SEQ ID NO: 909 - protein, 110 aa, Artificial Sequence
  Description of Artificial Sequence: Synthetic polypeptide
ELVMTQTPSSTSGAVGGTVTINCQASQSIDSNLAWFQQKPGQPPTLLIYRASNLASGVPSRFSGSRSGTEYTLTISGVQREDAATYYCLGGVGNVSYRTSFGGGTEVVVK

SEQ ID NO: 910 - protein, 113 aa, Artificial Sequence
  Description of Artificial Sequence: Synthetic polypeptide
DIVMSQSPDSLAVSLGERVTLNCKSSQSLLYSGNQKNYLAWYQQKPGQSPKLLIYWASARESGVPDRFSGSGSGTDFTLTISSVQAEDVAVYYCQQYYSYPLTFGAGTKLELK

SEQ ID NO: 911 - protein, 107 aa, Artificial Sequence
  Description of Artificial Sequence: Synthetic polypeptide
SIVMTQTPKFLLVSAGDRVTITCKASQSVSNDVAWYQQKPGQSPKLLINFATNRYTGVPNRFTGSGYGTDFTFTISTVQAEDLALYFCQQDYSSPWTFGGGTKLEIK

SEQ ID NO: 912 - protein, 115 aa, Artificial Sequence
  Description of Artificial Sequence: Synthetic polypeptide
SVIMSRGQIVLTQSPAIMSASLGERVTLTCTASSSVNSNYLHWYQQKPGSSPKLWIYSTSNLASGVPARFSGSGSGTSYSLTISSMEAEDAATYYCHQYHRSPLTFGAGTKLELK

SEQ ID NO: 913 - protein, 107 aa, Artificial Sequence
  Description of Artificial Sequence: Synthetic polypeptide
DIVMTQSHIFMSTSVGDRVSITCKASQDVDTAVAWYQQKPGQSPKLLIYWASTRLTGVPDRFTGSGSGTDFTLTISNVQSEDLADYFCQQYSSYPYTFGGGTKLEIK

SEQ ID NO: 914 - protein, 107 aa, Artificial Sequence
  Description of Artificial Sequence: Synthetic polypeptide
DIQLTQSPSSLSASVGDRVSITCKASQDVSIAVAWYQQKPGKAPKLLIYSASYRYTGVPDRFSGSGSGTDFTLTISSLQPEDFAVYYCQQHYITPLTFGAGTKVEIK

SEQ ID NO: 915 - protein, 108 aa, Artificial Sequence
  Description of Artificial Sequence: Synthetic polypeptide
EIVLTQSPGTLSLSPGERATLSCRASQSVSSSYLAWYQQKPGQAPRLLIYGASSRATGIPDRFSGSGSGTDFTLTISRLEPEDFAVYYCQQYGSSPLTFGGGTKVEIK

SEQ ID NO: 916 - protein, 107 aa, Artificial Sequence [sequence omitted]

SEQ ID NO: 917 - protein, 107 aa, Artificial Sequence
  Description of Artificial Sequence: Synthetic polypeptide
DIQMTQSPSSLSASVGDRVTITCRASQDIAGSLNWLQQKPGKAIKRLIYATSSLDSGVPKRFSGSRSGSDYTLTISSLQPEDFATYYCLQYGSFPPTFGQGTKVEIK

SEQ ID NO: 918 - protein, 111 aa, Artificial Sequence
  Description of Artificial Sequence: Synthetic polypeptide
DIVLTQSPASLAVSLGQRATISCRASESVDSYGNSFMHWYQQKPGQPPKLLIYRASNLESGIPARFSGSGSRTDFTLTINPVEADDVATYYCQQSNEDPLTFGAGTKLELK

SEQ ID NO: 919 - protein, 109 aa, Artificial Sequence
  Description of Artificial Sequence: Synthetic polypeptide
ELVVTQEPSLTVSPGGTVTLTCRSSTGAVTTSNYANWVQQKPGQAPRGLIGGTNKRAPGTPARFSGSSLGGSAALTLSGVQPEDEAEYYCALWYSNLWVFGGGTKLTVL

SEQ ID NO: 920 - protein, 125 aa, Artificial Sequence
  Description of Artificial Sequence: Synthetic polypeptide
EVQLQESGGGLVQPGGSLKLSCAASGFTFNTYAMNWVRQAPGKGLEWVARIRSKYNNYATYYADSVKDRFTISRDDSKNTAYLQMNNLKTEDTAVYYCVRHGNFGNSYVSWFAYWGQGTLVTVSS

SEQ ID NO: 921 - protein, 264 aa, Artificial Sequence
  Description of Artificial Sequence: Synthetic polypeptide
ELVVTQEPSLTVSPGGTVTLTCRSSTGAVTTSNYANWVQQKPGQAPRGLIGGTNKRAPGTPARFSGSSLGGSAALTLSGVQPEDEAEYYCALWYSNLWVFGGGTKLTVLGATPPETGAETESPGETTGGSAESEPPGEGEVQLQESGGGLVQPGGSLKLSCAASGFTFNTYAMNWVRQAPGKGLEWVARIRSKYNNYATYYADSVKDRFTISRDDSKNTAYLQMNNLKTEDTAVYYCVRHGNFGNSYVSWFAYWGQGTLVTVSS

SEQ ID NO: 922 - protein, 144 aa, Artificial Sequence
  Description of Artificial Sequence: Synthetic polypeptide
GSPAGSPTSTEEGTSESATPESGPGTSTEPSEGSAPGSPAGSPTSTEEGTSTEPSEGSAPGTSTEPSEGSAPGTSESATPESGPGSEPATSGSETPGSEPATSGSETPGSPAGSPTSTEEGTSESATPESGPGTSTEPSEGSAP

SEQ ID NO: 923 - protein, 292 aa, Artificial Sequence; identical to SEQ ID NO: 714
  Description of Artificial Sequence: Synthetic polypeptide

SEQ ID NO: 924 - protein, 293 aa, Artificial Sequence
  Description of Artificial Sequence: Synthetic polypeptide
PGSPAGSPTSTEEGTSESATPESGPGTSTEPSEGSAPGSPAGSPTSTEEGTSTEPSEGSAPGTSTEPSEGSAPGTSESATPESGPGSEPATSGSETPGSEPATSGSETPGSPAGSPTSTEEGTSESATPESGPGTSTEPSEGSAPGTSTEPSEGSAPGSPAGSPTSTEEGTSTEPSEGSAPGTSTEPSEGSAPGTSESATPESGPGTSTEPSEGSAPGTSESATPESGPGSEPATSGSETPGTSTEPSEGSAPGTSTEPSEGSAPGTSESATPESGPGTSESATPEGAAEPEA

SEQ ID NO: 925 - protein, 300 aa, Artificial Sequence
  Description of Artificial Sequence: Synthetic polypeptide
PGSPAGSPTSTEEGTSESATPESGPGTSTEPSEGSAPGSPAGSPTSTEEGTSTEPSEGSAPGTSTEPSEGSAPGTSESATPESGPGSEPATSGSETPGSEPATSGSETPGSPAGSPTSTEEGTSESATPESGPGTSTEPSEGSAPGTSTEPSEGSAPGSPAGSPTSTEEGTSTEPSEGSAPGTSTEPSEGSAPGTSESATPESGPGTSTEPSEGSAPGTSESATPESGPGSEPATSGSETPGTSTEPSEGSAPGTSTEPSEGSAPGTSESATPESGPGTSESATPESGPGSPAGAAEPEA

SEQ ID NO: 926 - protein, 584 aa, Artificial Sequence
  Description of Artificial Sequence: Synthetic polypeptide
PGSPAGSPTSTEEGTSESATPESGPGTSTEPSEGSAPGSPAGSPTSTEEGTSTEPSEGSAPGTSTEPSEGSAPGTSESATPESGPGSEPATSGSETPGSEPATSGSETPGSPAGSPTSTEEGTSESATPESGPGTSTEPSEGSAPGTSTEPSEGSAPGSPAGSPTSTEEGTSTEPSEGSAPGTSTEPSEGSAPGTSESATPESGPGTSTEPSEGSAPGTSESATPESGPGSEPATSGSETPGTSTEPSEGSAPGTSTEPSEGSAPGTSESATPESGPGTSESATPESGPGSPAGSPTSTEEGTSESATPESGPGSEPATSGSETPGTSESATPESGPGTSTEPSEGSAPGTSTEPSEGSAPGTSTEPSEGSAPGTSTEPSEGSAPGTSTEPSEGSAPGTSTEPSEGSAPGSPAGSPTSTEEGTSTEPSEGSAPGTSESATPESGPGSEPATSGSETPGTSESATPESGPGSEPATSGSETPGTSESATPESGPGTSTEPSEGSAPGTSESATPESGPGSPAGSPTSTEEGSPAGSPTSTEEGSPAGSPTSTEEGTSESATPESGPGTSTEPSEGSAPGAAEPEA

SEQ ID NO: 927 - protein, 870 aa, Artificial Sequence
  Description of Artificial Sequence: Synthetic polypeptide
PGSPAGSPTSTEEGTSESATPESGPGTSTEPSEGSAPGSPAGSPTSTEEGTSTEPSEGSAPGTSTEPSEGSAPGTSESATPESGPGSEPATSGSETPGSEPATSGSETPGSPAGSPTSTEEGTSESATPESGPGTSTEPSEGSAPGTSTEPSEGSAPGSPAGSPTSTEEGTSTEPSEGSAPGTSTEPSEGSAPGTSESATPESGPGTSTEPSEGSAPGTSESATPESGPGSEPATSGSETPGTSTEPSEGSAPGTSTEPSEGSAPGTSESATPESGPGTSESATPESGPGSPAGSPTSTEEGTSESATPESGPGSEPATSGSETPGTSESATPESGPGTSTEPSEGSAPGTSTEPSEGSAPGTSTEPSEGSAPGTSTEPSEGSAPGTSTEPSEGSAPGTSTEPSEGSAPGSPAGSPTSTEEGTSTEPSEGSAPGTSESATPESGPGSEPATSGSETPGTSESATPESGPGSEPATSGSETPGTSESATPESGPGTSTEPSEGSAPGTSESATPESGPGSPAGSPTSTEEGSPAGSPTSTEEGSPAGSPTSTEEGTSESATPESGPGTSTEPSEGSAPGTSESATPESGPGSEPATSGSETPGTSESATPESGPGSEPATSGSETPGTSESATPESGPGTSTEPSEGSAPGSPAGSPTSTEEGTSESATPESGPGSEPATSGSETPGTSESATPESGPGSPAGSPTSTEEGSPAGSPTSTEEGTSTEPSEGSAPGTSESATPESGPGTSESATPESGPGTSESATPESGPGSEPATSGSETPGSEPATSGSETPGSPAGSPTSTEEGTSTEPSEGSAPGTSTEPSEGSAPGSEPATSGSETPGTSESATPESGPGTSTEPSEGSAPGEPEA

SEQ ID NO: 928 - DNA, 4263 bp, Artificial Sequence
  Description of Artificial Sequence: Synthetic polynucleotide
gatatccagatgacacagagcccttctagcctgtctgcttctgtgggagatagagtgaccatcacgtgtcgcagtaccaagtccctcctgcatagcaacggcatcacatatctgtattggtatcagcaaaagccggggaaggctcctaaactgctgatctaccaaatgtctaatttagcctctggagttccttctagattctcaagctctggctctggcaccgattttacactgaccatctctagcctgcagcctgaggattttgccacctactattgcgcccagaacctggaaatcccaaggacatttggacagggcaccaaggtggagattaagggcgcgacccctcccgaaaccggcgcggagacagaaagtccaggcgagactacaggagggtcggctgagtcagaacctccgggcgaaggacaagtccagctcgtgcaatccgggccaggactagtgcaaccaggaggctctgtgagaatctcctgtgcggcctctggttatacctttactaattatgggatgaattgggtgaaacaggctcccggcaaggggctcgagtggatgggctggatcaacacatatacaggagagagcacctacgccgatagcttcaagggacgtttcactttcagtctggacacatctgcttctgctgcttatttacagatcaactccttacgggccgaagataccgcggtatattactgcgcacgcttcgccatcaaaggcgactactggggacagggtacacttttgactgtcagctcaggaggcggaggatctgaattagttgtgacccaagagccaagcctgactgtttctccaggcggcacagtgaccctgacttgcagatcaagtacaggagctgtgacaacctctaattacgcaaactgggtacagcaaaagcctggccaagcaccgcgtggacttattggcggcaccaacaaaagagctccaggaacaccagcccgcttctcaggtagcctgcttggcggaaaagctgccctgacattatctggagttcagcctgaggacgaggccgagtactattgcgcgctgtggtactctaatctgtgggtgtttggaggagggaccaaactgaccgtgctgggcgccacacctccagagactggtgccgaaaccgagagccccggggaaacaacgggtggtagcgctgagagcgaaccgcccggggaaggcgaggtccagttactggagtcgggaggcggcctcgtccagcctgggggaagcctcaaactttcttgcgctgctagcgggtttaccttcaacacttatgcaatgaactgggtacggcaagctcccggaaaagggttagagtgggtggctcgtatcaggtctaagtacaacaactatgcaacctactacgcggattcagtgaaggacagatttactatttcccgtgacgatagcaagaatacagcatatttgcagatgaacaatctgaagaccgaagacaccgcggtgtactattgcgtgagacacggaaattttgggaacagctatgtgagctggtttgcctattggggccagggtaccctcgttacagttagctcgggtaccgccgaggccgctagcgcctcaggagaggccggaagaagcgccaatcacacacctgctggattgactggccccccaggtagcccagctggtagcccaacctctaccgaagaaggtacctctgaatccgctactccagaatccggtcctggtactagcactgagccaagcgaaggttctgctccaggctccccggcaggtagccctacctctaccgaagagggcactagcaccgaaccatctgagggttccgctcctggcacctccactgaaccgtccgaaggcagtgctccgggtacttccgaaagcgcaactccggaatccggccctggttctgagcctgctacttccggctctgaaactccaggtagcgagccagcgacttctggttctgaaactccaggttcaccggcgggtagcccgacgagcacggaggaaggtacctctgagtcggccactcctgagtccggtccgggcacgagcaccgagccgagcgagggttcagccccgggtaccagcacggagccgtccgagggtagcgcaccgggttctccggcgggctcccctacgtctacggaagagggtacgtccactgaacctagcgagggcagcgcgccaggcaccagcactgaaccgagcgaaggcagcgcacctggcactagcgagtctgcgactccggagagcggtccgggtacgagcacggaaccaagcgaaggcagcgccccaggtacctctgaatctgctaccccagaatctggcccgggttccgagccagctacctctggttctgaaaccccaggtacttccactgaaccaagcgaaggtagcgctcctggcacttctactgaaccatccgaaggttccgctcctggtacgtctgaaagcgctacccctgaaagcggcccaggcacctctgaaagcgctactcctgagagcggtccaggctctccagcaggttctccaacctccactgaagaaggcacctctgagtctgctacccctgaatctggtcctggctccgaacctgctacctctggttccgaaactccaggtacctcggaatctgcgactccggaatctggcccgggcacgagcacggagccgtctgagggtagcgcaccaggtaccagcactgagccttctgagggctctgcaccgggtacctccacggaaccttcggaaggttctgcgccgggtacctccactgagccatccgagggttcagcaccaggtactagcacggaaccgtccgagggctctgcaccaggtacgagcaccgaaccgtcggagggtagcgctccaggtagcccagcgggctctccgacaagcaccgaagaaggcaccagcaccgagccgtccgaaggttccgcaccaggtacaagcgagagcgcgactcctgaatctggtccgggtagcgagcctgcaaccagcggttctgagacgccgggcacttccgaatctgcgaccccggagtccggtccaggttcagagccggcgacgagcggttcggaaacgccgggtacgtctgaatcagccacgccggagtctggtccgggtacctcgaccgaaccaagcgaaggttcggcaccgggtactagcgagagcgcaacccctgaaagcggtccgggcagcccggcaggttctccaaccagcaccgaagaaggttcccctgctggtagcccgacctctacggaggaaggtagccctgcaggttccccaacttctactgaggaaggtacttctgagtccgctaccccagaaagcggtcctggtacctccactgaaccgtctgaaggctctgcaccaggcacttctgagtctgctactccagaaagcggcccaggttctgaaccagcaacttctggctctgagactccaggcacttctgagtccgcaacgcctgaatccggtcctggttctgaaccagctacttccggcagcgaaaccccaggtacctctgagtctgcgactccagagtctggtcctggtacttccactgagcctagcgagggttccgcaccaggttctccggctggtagcccgaccagcacggaggagggtacgtctgaatctgcaacgccggaatcgggcccaggttcggagcctgcaacgtctggcagcgaaaccccgggtacctccgaatctgctacaccggaaagcggtcctggcagccctgctggttctccaacctctaccgaggagggttcaccggcaggtagcccgactagcactgaagaaggtactagcacggagccgagcgagggtagtgctccgggtacgagcgagagcgcaacgccagagagcggtccaggcaccagcgaatcggccacccctgagagcggcccaggtacttctgagagcgccactcctgaatccggccctggtagcgagccggcaacctccggctcagaaactcctggttcggaaccagcgaccagcggttctgaaactccgggtagcccggcaggcagcccaacgagcaccgaagagggtaccagcacggaaccgagcgagggttctgccccgggtacttccaccgaaccatcggagggctctgcacctggtagcgaacctgcgacgtctggttctgaaacgccgggtaccagcgaaagcgctaccccagaatccggtccgggcactagcaccgagccatcggagggcgccgcagaaccagaggcg

SEQ ID NO: 929 - DNA, 5247 bp, Artificial Sequence
  Description of Artificial Sequence: Synthetic polynucleotide
caccatcatcaccatcactccccagcaggcagcccgaccagcaccgaggagggtacgagcgagtcggctactccagagagcggtccgggtacctctacggaaccgtccgaaggtagcgctccaggcacgtctgaaagcgcgacgccggaaagcggtccaggcagcgagccggcgacctccggtagcgaaacgcctggtacctcggagtcagcgactccggaaagcggtccgggtagcgaacctgcaacgagcggtagcgagactccaggcactagcgaatccgcaactccggagtcgggtccgggcacctctacggagcctagcgagggctcagcaccaggtagccctgcaggttccccgacgtcaaccgaggaaggtacaagcgaaagcgccacccctgagtcgggccctggcagcgaaccggcaactagcggcagcgagactccgggtaccagcgagtctgctacgccagagagcggcccaggttcgccagcgggttcgccgactagcacggaggagggcagcccagcgggtagcccgaccagcactgaggagggtacgtccaccgaaccgagcgaaggtagcgcaccaggtacctccgagtctgccacccctgaatccggtccaggtaccagcgaatcagccaccccggagtcgggtccaggtacgagcgaatctgctaccccggaatccggcccaggcagcgaacctgctactagcggcagcgaaacgccgggcagcgaacctgccacgtcaggcagcgagacgccgggttcccctgcaggctccccgaccagcactgaggagggcacctccaccgaaccatcagaaggtagcgcgcctggtacgtcaaccgaaccttccgagggcagcgcaccgggtggctcagcgcctacgactggtgaagccggagaggcagctggtgctacaagcgccggcgctactgggcctgctaccagcggctctgagacccctggaacagacattcagatgactcagtctccgtcctccctgtctgcgagcgtgggcgaccgtgtgactattacctgtaaagcctcccaggacgtgtctatcggtgtggcatggtatcaacaaaagccgggtaaggcacctaaactgctgatctactccgcttcttaccgttacacgggcgttccgtcccgttttagcggttccggtagcggtactgattttaccctgactatttcctccctgcaaccagaagactttgcgacctattactgtcagcaatactatatttacccgtataccttcggccagggcactaaggttgaaattaaaggtgcaacgcctccggagactggtgctgaaactgagtccccgggcgagacgaccggtggctctgctgaatccgaaccaccgggcgaaggcgaggttcagctggtggagtctggcggcggtctggtacagccgggtggtagcctgcgtctgagctgcgcggcgtccggtttcactttcaccgattataccatggactgggttcgccaggcaccgggcaagggtctggaatgggtggcggacgtgaacccgaactccggtggttctatctacaaccagcgtttcaaaggtcgtttcacgctgagcgtagatcgtagcaaaaacactctgtacctgcagatgaactccctgcgcgcagaagacaccgcggtgtattactgtgcacgtaacctgggcccgtccttctatttcgactactggggtcaaggtactctggtaactgtttcctctggtggtggcggcagcgagttagttgtgacccaagagccgagcctgaccgttagcccgggtggtacggtcaccctgacgtgccgtagcagcaacggtgcggtcacgagcagcaactatgccaattgggtccagcagaaaccgggtcaagcaccgcgtggcctgatcggcggcaccaataaacgtgccccgggtactcctgcgcgtttctccggtagcctgctgggcggcaaagccgctctgaccctgagcggtgtccagccggaagatgaagcggtgtactactgcgcgctgtggtatccgaatctgtgggtttttggcggcggtaccaagctgaccgtattgggtgctacgccaccggagactggcgcagaaacggaaagcccgggtgagactacgggtggctctgcggagagcgaacctccgggtgagggtgaggtccaactgctggagtctggtggtggcattgttcaaccgggtggctcgttgaagctgagctgtgcagctagcggctttaccttcaacacctatgcgatgaattgggttcgtcaggcaccgggtaagggcctggaatgggtggcgcgtatccgctccaagtacaacaactacgcgacctactacgcggatagcgttaaagaccgcttcacgattagccgtgacgattccaagaatacggtgtatctgcaaatgaacaatctgaaaaccgaagataccgcggtgtattactgtgtgcgccacgaaaatttcggcaacagctacgtgagctggtttgcacattggggtcagggcaccctggttacggtgagctccggaacagccgaagccgctagcgcatccggtacgacaggagaggcaggggaggccgctggcgctaccagtgctggagccaccggtcctccaggcagccccgcggggagtcctacgagcactgaagaagggaccagtgagagcgccacacctgagagcggccctggaaccagcacggagccatccgaagggtcagcaccgggatctccggccggctctcccacgtcaaccgaagagggaacgagcactgagccctccgaggggagtgcgcctgggacatctacagagccatcagaaggcagtgctccgggtacttccgaaagcgcaactccggaatccggccctggttctgagcctgctacttccggctctgaaactccaggtagcgagccagcgacttctggttctgaaactccaggttcaccggcgggtagcccgacgagcacggaggaaggtacctctgagtcggccactcctgagtccggtccgggcacgagcaccgagccgagcgagggttcagccccgggtaccagcacggagccgtccgagggtagcgcaccgggttctccggcgggctcccctacgtctacggaagagggtacgtccactgaacctagcgagggcagcgcgccaggcaccagcactgaaccgagcgaaggcagcgcacctggcactagcgagtctgcgactccggagagcggtccgggtacgagcacggaaccaagcgaaggcagcgccccaggtacctctgaatctgctaccccagaatctggcccgggttccgagccagctacctctggttctgaaaccccaggtacttccactgaaccaagcgaaggtagcgctcctggcacttctactgaaccatccgaaggttccgctcctggtacgtctgaaagcgctacccctgaaagcggcccaggcacctctgaaagcgctactcctgagagcggtccaggctctccagcaggttctccaacctccactgaagaaggcacctctgagtctgctacccctgaatctggtcctggctccgaacctgctacctctggttccgaaactccaggtacctcggaatctgcgactccggaatctggcccgggcacgagcacggagccgtctgagggtagcgcaccaggtaccagcactgagccttctgagggctctgcaccgggtacctccacggaaccttcggaaggttctgcgccgggtacctccactgagccatccgagggttcagcaccaggtactagcacggaaccgtccgagggctctgcaccaggtacgagcaccgaaccgtcggagggtagcgctccaggtagcccagcgggctctccgacaagcaccgaagaaggcaccagcaccgagccgtccgaaggttccgcaccaggtacaagcgagagcgcgactcctgaatctggtccgggtagcgagcctgcaaccagcggttctgagacgccgggcacttccgaatctgcgaccccggagtccggtccaggttcagagccggcgacgagcggttcggaaacgccgggtacgtctgaatcagccacgccggagtctggtccgggtacctcgaccgaaccaagcgaaggttcggcaccgggtactagcgagagcgcaacccctgaaagcggtccgggcagcccggcaggttctccaaccagcaccgaagaaggttcccctgctggtagcccgacctctacggaggaaggtagccctgcaggttccccaacttctactgaggaaggtacttctgagtccgctaccccagaaagcggtcctggtacctccactgaaccgtctgaaggctctgcaccaggcacttctgagtctgctactccagaaagcggcccaggttctgaaccagcaacttctggctctgagactccaggcacttctgagtccgcaacgcctgaatccggtcctggttctgaaccagctacttccggcagcgaaaccccaggtacctctgagtctgcgactccagagtctggtcctggtacttccactgagcctagcgagggttccgcaccaggttctccggctggtagcccgaccagcacggaggagggtacgtctgaatctgcaacgccggaatcgggcccaggttcggagcctgcaacgtctggcagcgaaaccccgggtacctccgaatctgctacaccggaaagcggtcctggcagccctgctggttctccaacctctaccgaggagggttcaccggcaggtagcccgactagcactgaagaaggtactagcacggagccgagcgagggtagtgctccgggtacgagcgagagcgcaacgccagagagcggtccaggcaccagcgaatcggccacccctgagagcggcccaggtacttctgagagcgccactcctgaatccggccctggtagcgagccggcaacctccggctcagaaactcctggttcggaaccagcgaccagcggttctgaaactccgggtagcccggcaggcagcccaacgagcaccgaagagggtaccagcacggaaccgagcgagggttctgccccgggtacttccaccgaaccatcggagggctctgcacctggtagcgaacctgcgacgtctggttctgaaacgccgggtaccagcgaaagcgctaccccagaatccggtccgggcactagcaccgagccatcggagggcgccgcagaaccagaggcg

SEQ ID NO: 930 - skipped

SEQ ID NO: 931 - DNA, 5145 bp, Artificial Sequence
  Description of Artificial Sequence: Synthetic polynucleotide
caccatcatcaccatcactccccagcaggcagcccgaccagcaccgaggagggtacgagcgagtcggctactccagagagcggtccgggtacctctacggaaccgtccgaaggtagcgctccaggcacgtctgaaagcgcgacgccggaaagcggtccaggcagcgagccggcgacctccggtagcgaaacgcctggtacctcggagtcagcgactccggaaagcggtccgggtagcgaacctgcaacgagcggtagcgagactccaggcactagcgaatccgcaactccggagtcgggtccgggcacctctacggagcctagcgagggctcagcaccaggtagccctgcaggttccccgacgtcaaccgaggaaggtacaagcgaaagcgccacccctgagtcgggccctggcagcgaaccggcaactagcggcagcgagactccgggtaccagcgagtctgctacgccagagagcggcccaggttcgccagcgggttcgccgactagcacggaggagggcagcccagcgggtagcccgaccagcactgaggagggtacgtccaccgaaccgagcgaaggtagcgcaccaggtacctccgagtctgccacccctgaatccggtccaggtaccagcgaatcagccaccccggagtcgggtccaggtacgagcgaatctgctaccccggaatccggcccaggcagcgaacctgctactagcggcagcgaaacgccgggcagcgaacctgccacgtcaggcagcgagacgccgggttcccctgcaggctccccgaccagcactgaggagggcacctccaccgaaccatcagaaggtagcgcgcctggtacgtcaaccgaaccttccgagggcagcgcaccgggtggctcagcgcctacgactggtgaagccggagaggcagctggtgctacaagcgccggcgctactgggcctgctaccagcggctctgagacccctggaacagacatacaaatgacccagtctccttcctccttaccagcgagcctgggtgaccgtgtaaccatcaattgtcaggcttctcaggacatcagcaactaccttaactggtaccagcagaaacctggaaaagcgcctaagctgctgatttattacactaataaactcgccgatggcgtcccctcgagattttctggttccggcagcggacgcgactccagcttcactatcagcagtctggaaagcgaagacataggcagttactactgtcagcagtactacaattatccttggacattcggtcctggaaccaagctcgaaattaagggcggaggaggctccgatatccagatgactcagtctccctcttccctgtcggcatcagtgggcgacagagtgaccatcacctgcagatccacaaagtctctgctgcactctaacggcattacttacttatattggtatcagcagaaacctggaaaggcacccaaattattgatctatcagatgtcaaatcttgcgagcggcgttccctccagatttagctcttccggctctggcactgattttactctgacaataagctcactgcagccagaggatttcgcgacctattactgtgctcagaacctcgaaattcctcggactttcggacagggaaccaaagtcgagatcaagggagctacacctcccgaaacaggagcagagacagagtcgcctggagagactaccgggggaagcgccgagtctgaacctcctggagagggacaggtgcaactggtgcagtctggaccagggttagtgcagcccggaggcagtgtgagaatctcttgtgctgcttctggctacaccttcaccaattacggcatgaactgggtgaagcaggcccctggaaaaggacttgagtggatgggctggatcaacacctatacaggggaaagcacctatgccgacagcttcaagggcagattcaccttcagcctggacacttcagcctccgctgcttatctgcagattaactctctaagggcagaggataccgccgtttattactgtgccaggtttgccatcaaaggcgattactggggacaaggcactctcctcactgtgagctctggaggaggaggatctgaagtgcaattggtggagagcggcgggggtctggtccagcctggcaagtctctgaagctgagctgtgaggcgagtggatttacctttagcggctatggaatgcactgggtgagacaagctcctggaagaggactggaatctgtggcctacatcacaagcagcagcatcaacatcaagtacgccgatgccgtgaagggcagatttacagtgagccgggataatgccaagaacctgctctttctccagatgaatatactgaaaagtgaggacacagccatgtactactgtgcccgtttcgactgggacaagaactattggggccagggaactatggtgaccgtgtctagcggaacagccgaagccgctagcgcatccggtacgacaggagaggcaggggaggccgctggcgctaccagtgctggagccaccggtcctccaggcagccccgcggggagtcctacgagcactgaagaagggaccagtgagagcgccacacctgagagcggccctggaaccagcacggagccatccgaagggtcagcaccgggatctccggccggctctcccacgtcaaccgaagagggaacgagcactgagccctccgaggggagtgcgcctgggacatctacagagccatcagaaggcagtgctccgggtacttccgaaagcgcaactccggaatccggccctggttctgagcctgctacttccggctctgaaactccaggtagcgagccagcgacttctggttctgaaactccaggttcaccggcgggtagcccgacgagcacggaggaaggtacctctgagtcggccactcctgagtccggtccgggcacgagcaccgagccgagcgagggttcagccccgggtaccagcacggagccgtccgagggtagcgcaccgggttctccggcgggctcccctacgtctacggaagagggtacgtccactgaacctagcgagggcagcgcgccaggcaccagcactgaaccgagcgaaggcagcgcacctggcactagcgagtctgcgactccggagagcggtccgggtacgagcacggaaccaagcgaaggcagcgccccaggtacctctgaatctgctaccccagaatctggcccgggttccgagccagctacctctggttctgaaaccccaggtacttccactgaaccaagcgaaggtagcgctcctggcacttctactgaaccatccgaaggttccgctcctggtacgtctgaaagcgctacccctgaaagcggcccaggcacctctgaaagcgctactcctgagagcggtccaggctctccagcaggttctccaacctccactgaagaaggcacctctgagtctgctacccctgaatctggtcctggctccgaacctgctacctctggttccgaaactccaggtacctcggaatctgcgactccggaatctggcccgggcacgagcacggagccgtctgagggtagcgcaccaggtaccagcactgagccttctgagggctctgcaccgggtacctccacggaaccttcggaaggttctgcgccgggtacctccactgagccatccgagggttcagcaccaggtactagcacggaaccgtccgagggctctgcaccaggtacgagcaccgaaccgtcggagggtagcgctccaggtagcccagcgggctctccgacaagcaccgaagaaggcaccagcaccgagccgtccgaaggttccgcaccaggtacaagcgagagcgcgactcctgaatctggtccgggtagcgagcctgcaaccagcggttctgagacgccgggcacttccgaatctgcgaccccggagtccggtccaggttcagagccggcgacgagcggttcggaaacgccgggtacgtctgaatcagccacgccggagtctggtccgggtacctcgaccgaaccaagcgaaggttcggcaccgggtactagcgagagcgcaacccctgaaagcggtccgggcagcccggcaggttctccaaccagcaccgaagaaggttcccctgctggtagcccgacctctacggaggaaggtagccctgcaggttccccaacttctactgaggaaggtacttctgagtccgctaccccagaaagcggtcctggtacctccactgaaccgtctgaaggctctgcaccaggcacttctgagtctgctactccagaaagcggcccaggttctgaaccagcaacttctggctctgagactccaggcacttctgagtccgcaacgcctgaatccggtcctggttctgaaccagctacttccggcagcgaaaccccaggtacctctgagtctgcgactccagagtctggtcctggtacttccactgagcctagcgagggttccgcaccaggttctccggctggtagcccgaccagcacggaggagggtacgtctgaatctgcaacgccggaatcgggcccaggttcggagcctgcaacgtctggcagcgaaaccccgggtacctccgaatctgctacaccggaaagcggtcctggcagccctgctggttctccaacctctaccgaggagggttcaccggcaggtagcccgactagcactgaagaaggtactagcacggagccgagcgagggtagtgctccgggtacgagcgagagcgcaacgccagagagcggtccaggcaccagcgaatcggccacccctgagagcggcccaggtacttctgagagcgccactcctgaatccggccctggtagcgagccggcaacctccggctcagaaactcctggttcggaaccagcgaccagcggttctgaaactccgggtagcccggcaggcagcccaacgagcaccgaagagggtaccagcacggaaccgagcgagggttctgccccgggtacttccaccgaaccatcggagggctctgcacctggtagcgaacctgcgacgtctggttctgaaacgccgggtaccagcgaaagcgctaccccagaatccggtccgggcactagcaccgagccatcggagggcgccgcagaaccagaggcg

SEQ ID NO: 932 - DNA, 5154 bp, Artificial Sequence
  Description of Artificial Sequence: Synthetic polynucleotide
caccatcatcaccatcactccccagcaggcagcccgaccagcaccgaggagggtacgagcgagtcggctactccagagagcggtccgggtacctctacggaaccgtccgaaggtagcgctccaggcacgtctgaaagcgcgacgccggaaagcggtccaggcagcgagccggcgacctccggtagcgaaacgcctggtacctcggagtcagcgactccggaaagcggtccgggtagcgaacctgcaacgagcggtagcgagactccaggcactagcgaatccgcaactccggagtcgggtccgggcacctctacggagcctagcgagggctcagcaccaggtagccctgcaggttccccgacgtcaaccgaggaaggtacaagcgaaagcgccacccctgagtcgggccctggcagcgaaccggcaactagcggcagcgagactccgggtaccagcgagtctgctacgccagagagcggcccaggttcgccagcgggttcgccgactagcacggaggagggcagcccagcgggtagcccgaccagcactgaggagggtacgtccaccgaaccgagcgaaggtagcgcaccaggtacctccgagtctgccacccctgaatccggtccaggtaccagcgaatcagccaccccggagtcgggtccaggtacgagcgaatctgctaccccggaatccggcccaggcagcgaacctgctactagcggcagcgaaacgccgggcagcgaacctgccacgtcaggcagcgagacgccgggttcccctgcaggctccccgaccagcactgaggagggcacctccaccgaaccatcagaaggtagcgcgcctggtacgtcaaccgaaccttccgagggcagcgcaccgggtggctcagcgcctgaggcaggtcgttctgctaaccatacccctgcaggattaactggccccgccaccagcgggagcgagacccccgggactgagttagttgttacacaggagccttccctgaccgtttcacccggggggacggtgacgctgacctgcagatctagcacaggagctgtgaccaccagcaattacgccaattgggtgcagcagaaaccgggacaagcaccgcgtggactgattggcggcaccaacaaacgggcccccggcacacccgcccgctttagcggctctctgttaggcggaaaagctgccctgaccttatctggagttcagcctgaagacgaagcagaatactattgcgcactttggtacagcaacctgtgggtgtttggcggtggcacgaagctcactgtcctaggcggcgggggcagcgacatccaaatgacccaatccccttcttctctgtctgcctctgtcggtgaccgagtgaccatcacctgtcaagcttctcaagatatatctaattacctgaactggtatcagcagaagcccggcaaagcccctaaactgctgatctacgatgccagcaatctggaaacaggagttcctagcagattttcgggttcaggctctggaaccgatttcacattcaccatcagctctttacagccagaggacattgctacctacttctgccagcacttcgaccacctgcctctggccttcggcggagggacaaaggtggagatcaaaggagctacaccacccgaaacaggagccgagacagaatcacccggcgaaactactggcggatccgccgagtccgagccgcctggggaaggacaagtgcagctacaagagtccgggccagggcttgtgaagccatctgaaaccctcagtttgacatgcacagtgtctggcggaagtgtatcttccggcgactactactggacatggatccgacaaagccctggaaaggggttagagtggatcggacatatctactacagcggcaataccaactataatcctagcctgaagtctagactgaccatctctatcgatacatcgaaaacccagttcagcctgaaactcagctcagtcaccgcggctgataccgcgatatactattgcgtgcgtgaccgggttacaggcgcctttgatatctggggacagggaaccatggttaccgtgtcctcaggcggaggaggaagtgaagtgcagcttctagagtccggaggtggcttggtgcagcctggtggatccttgaaactgagttgcgccgctagcggcttcacctttaacacctacgccatgaactgggtccggcaagcacctggcaagggattggaatgggtggccagaattcggtcaaagtacaacaactacgccacctactacgccgactctgtgaaggaccgcttcacaatttccagggatgattctaaaaatacagcctacctgcagatgaacaacctgaagaccgaagataccgcggtgtattactgtgtgcgtcacggcaattttggcaacagctatgtgagctggtttgcctattggggccaaggtacgctcgtgaccgtttcctctgggactgctgaggcggctagcgcctccggagaagctggaagaagcgccaatcacacaccagctggacttacaggcccgcctggtagccccgcggggagccctacaagcactgaggagggcacatctgagtccgctacccctgagagtggacccgggacaagcactgagcctagcgaaggaagcgcaccaggttcccccgctgggagccccacaagcacagaagagggaacttctaccgagccctctgagggctcagcccctggaactagcacagagccctccgaaggcagtgcaccgggtacttccgaaagcgcaactccggaatccggccctggttctgagcctgctacttccggctctgaaactccaggtagcgagccagcgacttctggttctgaaactccaggttcaccggcgggtagcccgacgagcacggaggaaggtacctctgagtcggccactcctgagtccggtccgggcacgagcaccgagccgagcgagggttcagccccgggtaccagcacggagccgtccgagggtagcgcaccgggttctccggcgggctcccctacgtctacggaagagggtacgtccactgaacctagcgagggcagcgcgccaggcaccagcactgaaccgagcgaaggcagcgcacctggcactagcgagtctgcgactccggagagcggtccgggtacgagcacggaaccaagcgaaggcagcgccccaggtacctctgaatctgctaccccagaatctggcccgggttccgagccagctacctctggttctgaaaccccaggtacttccactgaaccaagcgaaggtagcgctcctggcacttctactgaaccatccgaaggttccgctcctggtacgtctgaaagcgctacccctgaaagcggcccaggcacctctgaaagcgctactcctgagagcggtccaggctctccagcaggttctccaacctccactgaagaaggcacctctgagtctgctacccctgaatctggtcctggctccgaacctgctacctctggttccgaaactccaggtacctcggaatctgcgactccggaatctggcccgggcacgagcacggagccgtctgagggtagcgcaccaggtaccagcactgagccttctgagggctctgcaccgggtacctccacggaaccttcggaaggttctgcgccgggtacctccactgagccatccgagggttcagcaccaggtactagcacggaaccgtccgagggctctgcaccaggtacgagcaccgaaccgtcggagggtagcgctccaggtagcccagcgggctctccgacaagcaccgaagaaggcaccagcaccgagccgtccgaaggttccgcaccaggtacaagcgagagcgcgactcctgaatctggtccgggtagcgagcctgcaaccagcggttctgagacgccgggcacttccgaatctgcgaccccggagtccggtccaggttcagagccggcgacgagcggttcggaaacgccgggtacgtctgaatcagccacgccggagtctggtccgggtacctcgaccgaaccaagcgaaggttcggcaccgggtactagcgagagcgcaacccctgaaagcggtccgggcagcccggcaggttctccaaccagcaccgaagaaggttcccctgctggtagcccgacctctacggaggaaggtagccctgcaggttccccaacttctactgaggaaggtacttctgagtccgctaccccagaaagcggtcctggtacctccactgaaccgtctgaaggctctgcaccaggcacttctgagtctgctactccagaaagcggcccaggttctgaaccagcaacttctggctctgagactccaggcacttctgagtccgcaacgcctgaatccggtcctggttctgaaccagctacttccggcagcgaaaccccaggtacctctgagtctgcgactccagagtctggtcctggtacttccactgagcctagcgagggttccgcaccaggttctccggctggtagcccgaccagcacggaggagggtacgtctgaatctgcaacgccggaatcgggcccaggttcggagcctgcaacgtctggcagcgaaaccccgggtacctccgaatctgctacaccggaaagcggtcctggcagccctgctggttctccaacctctaccgaggagggttcaccggcaggtagcccgactagcactgaagaaggtactagcacggagccgagcgagggtagtgctccgggtacgagcgagagcgcaacgccagagagcggtccaggcaccagcgaatcggccacccctgagagcggcccaggtacttctgagagcgccactcctgaatccggccctggtagcgagccggcaacctccggctcagaaactcctggttcggaaccagcgaccagcggttctgaaactccgggtagcccggcaggcagcccaacgagcaccgaagagggtaccagcacggaaccgagcgagggttctgccccgggtacttccaccgaaccatcggagggctctgcacctggtagcgaacctgcgacgtctggttctgaaacgccgggtaccagcgaaagcgctaccccagaatccggtccgggcactagcaccgagccatcggagggcgccgcagaaccagaggcg

SEQ ID NO: 933 - DNA, 4266 bp, Artificial Sequence
  Description of Artificial Sequence: Synthetic polynucleotide
gatattcagatgacccaatcgccgtcgtccctgtcagcttcagtcggtgatcgtgttaccattacctgtcgctcaacgaaatccctgctgcattcaaacggtattacctatctgtactggtatcagcaaaaaccgggcaaagcgccgaaactgctgatctaccagatgtcgaatctggccagcggtgttccgtctcgttttagctctagtggttctggcaccgatttcaccctgacgatttcctcactgcaaccggaagactttgcaacgtattactgcgctcagaacctggaaatcccgcgtaccttcggtcaaggcacgaaagtcgaaattaaaggtgcaacgcctccggagactggtgctgaaactgagtccccgggcgagacgaccggtggctctgctgaatccgaaccaccgggcgaaggccaagtgcaactggttcagagcggtccgggtctggtccaaccgggtggcagtgtgcgtatttcctgcgcggcctcaggttacacctttacgaactatggcatgaattgggtgaaacaggccccgggtaaaggcctggaatggatgggttggatcaacacctacacgggcgaatctacctatgcagatagtttcaaaggccgctttaccttcagcctggacacgtctgctagtgcagcttatctgcagattaatagcctgcgtgcggaagatacggccgtttattactgtgcgcgctttgcaatcaaaggcgactactggggccaaggcaccctgctgaccgtgtcctccggtggtggcggcagcgacatccaaatgacccagagcccgagcagcctgagcgcgagcgtgggcgaccgtgttaccatcacctgccgtgcgagccaagacatccgtaactacctgaactggtatcagcaaaagccgggtaaagcgccgaagctgctgatctactataccagccgtctggagagcggcgtgccgagccgtttcagcggtagcggtagcggtaccgactacaccctgaccattagcagcctgcagccggaagatttcgcgacctactattgccagcagggtaacaccctgccgtggacctttggtcaaggcaccaaagttgagattaaaggcgccacgcctccggaaactggtgctgagacggaatcccctggtgaaaccactggcggttctgccgaatctgaaccgcctggtgaaggcgaggtgcagctggttgaaagcggtggcggtctggtgcaaccaggcggtagcctgcgtctgagctgcgcggcgagcggttacagctttaccggttataccatgaactgggttcgtcaagcgccaggtaaaggtctggagtgggtggcgctgatcaacccgtacaagggtgttagcacctataaccagaagttcaaagaccgttttaccattagcgtggataagagcaaaaacaccgcgtacctgcaaatgaacagcctgcgtgcggaggacaccgctgtgtactattgcgcgcgtagcggttactatggcgacagcgactggtattttgatgtgtggggccaaggcaccctggttaccgtgagctccggcaccgccgaagcagctagcgcctctggcgaaaatctgtattttcagggtgcatcttgcggcccactgggtctggctgggtctccaggtagcccagctggtagcccaacctctaccgaagaaggtacctctgaatccgctactccagaatccggtcctggtactagcactgagccaagcgaaggttctgctccaggctccccggcaggtagccctacctctaccgaagagggcactagcaccgaaccatctgagggttccgctcctggcacctccactgaaccgtccgaaggcagtgctccgggtacttccgaaagcgcaactccggaatccggccctggttctgagcctgctacttccggctctgaaactccaggtagcgagccagcgacttctggttctgaaactccaggttcaccggcgggtagcccgacgagcacggaggaaggtacctctgagtcggccactcctgagtccggtccgggcacgagcaccgagccgagcgagggttcagccccgggtaccagcacggagccgtccgagggtagcgcaccgggttctccggcgggctcccctacgtctacggaagagggtacgtccactgaacctagcgagggcagcgcgccaggcaccagcactgaaccgagcgaaggcagcgcacctggcactagcgagtctgcgactccggagagcggtccgggtacgagcacggaaccaagcgaaggcagcgccccaggtacctctgaatctgctaccccagaatctggcccgggttccgagccagctacctctggttctgaaaccccaggtacttccactgaaccaagcgaaggtagcgctcctggcacttctactgaaccatccgaaggttccgctcctggtacgtctgaaagcgctacccctgaaagcggcccaggcacctctgaaagcgctactcctgagagcggtccaggctctccagcaggttctccaacctccactgaagaaggcacctctgagtctgctacccctgaatctggtcctggctccgaacctgctacctctggttccgaaactccaggtacctcggaatctgcgactccggaatctggcccgggcacgagcacggagccgtctgagggtagcgcaccaggtaccagcactgagccttctgagggctctgcaccgggtacctccacggaaccttcggaaggttctgcgccgggtacctccactgagccatccgagggttcagcaccaggtactagcacggaaccgtccgagggctctgcaccaggtacgagcaccgaaccgtcggagggtagcgctccaggtagcccagcgggctctccgacaagcaccgaagaaggcaccagcaccgagccgtccgaaggttccgcaccaggtacaagcgagagcgcgactcctgaatctggtccgggtagcgagcctgcaaccagcggttctgagacgccgggcacttccgaatctgcgaccccggagtccggtccaggttcagagccggcgacgagcggttcggaaacgccgggtacgtctgaatcagccacgccggagtctggtccgggtacctcgaccgaaccaagcgaaggttcggcaccgggtactagcgagagcgcaacccctgaaagcggtccgggcagcccggcaggttctccaaccagcaccgaagaaggttcccctgctggtagcccgacctctacggaggaaggtagccctgcaggttccccaacttctactgaggaaggtacttctgagtccgctaccccagaaagcggtcctggtacctccactgaaccgtctgaaggctctgcaccaggcacttctgagtctgctactccagaaagcggcccaggttctgaaccagcaacttctggctctgagactccaggcacttctgagtccgcaacgcctgaatccggtcctggttctgaaccagctacttccggcagcgaaaccccaggtacctctgagtctgcgactccagagtctggtcctggtacttccactgagcctagcgagggttccgcaccaggttctccggctggtagcccgaccagcacggaggagggtacgtctgaatctgcaacgccggaatcgggcccaggttcggagcctgcaacgtctggcagcgaaaccccgggtacctccgaatctgctacaccggaaagcggtcctggcagccctgctggttctccaacctctaccgaggagggttcaccggcaggtagcccgactagcactgaagaaggtactagcacggagccgagcgagggtagtgctccgggtacgagcgagagcgcaacgccagagagcggtccaggcaccagcgaatcggccacccctgagagcggcccaggtacttctgagagcgccactcctgaatccggccctggtagcgagccggcaacctccggctcagaaactcctggttcggaaccagcgaccagcggttctgaaactccgggtagcccggcaggcagcccaacgagcaccgaagagggtaccagcacggaaccgagcgagggttctgccccgggtacttccaccgaaccatcggagggctctgcacctggtagcgaacctgcgacgtctggttctgaaacgccgggtaccagcgaaagcgctaccccagaatccggtccgggcactagcaccgagccatcggagggctccgcaccaggtcaccatcatcaccatcac

SEQ ID NO: 934 - DNA, 3069 bp, Artificial Sequence
  Description of Artificial Sequence: Synthetic polynucleotide
caccatcatcaccatcacggttctccggcgggtagcccaactagcaccgaggaaggtactagcgagagcgcaacgccggagtccggtccgggtacgtctacagaacctagcgagggttctgctccgggctctccagcaggctccccgacgagcaccgaggaaggcacttcgaccgagcctagcgagggtagcgcgcctggcaccagcaccgaaccgagcgagggtagcgctccgggcacctctgaaagcgcaaccccagaatccggcccaggctctgagccggcgactagcggttccgagactccgggctcggaaccggcgacgtccggcagcgaaacgccaggttcccctgccggttcgcctaccagcacggaagagggcacttcagagagtgcgacgccagagtcgggtcctggtaccagtaccgagccgagcgagggctcagcgcctgaagccggagaggcagctggtgctacaagcgccggcgctactgggcctgctaccagcggctctgagacccctggaacagacattcagatgactcagtctccgtcctccctgtctgcgagcgtgggcgaccgtgtgactattacctgtaaagcctcccaggacgtgtctatcggtgtggcatggtatcaacaaaagccgggtaaggcacctaaactgctgatctactccgcttcttaccgttacacgggcgttccgtcccgttttagcggttccggtagcggtactgattttaccctgactatttcctccctgcaaccagaagactttgcgacctattactgtcagcaatactatatttacccgtataccttcggccagggcactaaggttgaaattaaaggtgcaacgcctccggagactggtgctgaaactgagtccccgggcgagacgaccggtggctctgctgaatccgaaccaccgggcgaaggcgaggttcagctggtggagtctggcggcggtctggtacagccgggtggtagcctgcgtctgagctgcgcggcgtccggtttcactttcaccgattataccatggactgggttcgccaggcaccgggcaagggtctggaatgggtggcggacgtgaacccgaactccggtggttctatctacaaccagcgtttcaaaggtcgtttcacgctgagcgtagatcgtagcaaaaacactctgtacctgcagatgaactccctgcgcgcagaagacaccgcggtgtattactgtgcacgtaacctgggcccgtccttctatttcgactactggggtcaaggtactctggtaactgtttcctctggtggtggcggcagcgagttagttgtgacccaagagccgagcctgaccgttagcccgggtggtacggtcaccctgacgtgccgtagcagcaacggtgcggtcacgagcagcaactatgccaattgggtccagcagaaaccgggtcaagcaccgcgtggcctgatcggcggcaccaataaacgtgccccgggtactcctgcgcgtttctccggtagcctgctgggcggcaaagccgctctgaccctgagcggtgtccagccggaagatgaagcggtgtactactgcgcgctgtggtatccgaatctgtgggtttttggcggcggtaccaagctgaccgtattgggtgctacgccaccggagactggcgcagaaacggaaagcccgggtgagactacgggtggctctgcggagagcgaacctccgggtgagggtgaggtccaactgctggagtctggtggtggcattgttcaaccgggtggctcgttgaagctgagctgtgcagctagcggctttaccttcaacacctatgcgatgaattgggttcgtcaggcaccgggtaagggcctggaatgggtggcgcgtatccgctccaagtacaacaactacgcgacctactacgcggatagcgttaaagaccgcttcacgattagccgtgacgattccaagaatacggtgtatctgcaaatgaacaatctgaaaaccgaagataccgcggtgtattactgtgtgcgccacgaaaatttcggcaacagctacgtgagctggtttgcacattggggtcagggcaccctggttacggtgagctccggaacagccgaagccgctagcgcatccggtacgacaggagaggcaggggaggccgctggcgctaccagtgctggagccaccggtcctccaggcagccccgcggggagtcctacgagcactgaagaagggaccagtgagagcgccacacctgagagcggccctggaaccagcacggagccatccgaagggtcagcaccgggatctccggccggctctcccacgtcaaccgaagagggaacgagcactgagccctccgaggggagtgcgcctgggacatctacagagccatcagaaggcagtgctccgggtacttccgaaagcgcaactccggaatccggccctggttctgagcctgctacttccggctctgaaactccaggtagcgagccagcgacttctggttctgaaactccaggttcaccggcgggtagcccgacgagcacggaggaaggtacctctgagtcggccactcctgagtccggtccgggcacgagcaccgagccgagcgagggttcagccccgggtaccagcacggagccgtccgagggtagcgcaccgggttctccggcgggctcccctacgtctacggaagagggtacgtccactgaacctagcgagggcagcgcgccaggcaccagcactgaaccgagcgaaggcagcgcacctggcactagcgagtctgcgactccggagagcggtccgggtacgagcacggaaccaagcgaaggcagcgccccaggtacctctgaatctgctaccccagaatctggcccgggttccgagccagctacctctggttctgaaaccccaggtacttccactgaaccaagcgaaggtagcgctcctggcacttctactgaaccatccgaaggttccgctcctggtacgtctgaaagcgctacccctgaaagcggcccaggcacctctgaaagcgctactcctgagggcgccgcagaaccagaggcg

SEQ ID NO: 935 - DNA, 4275 bp, Artificial Sequence
  Description of Artificial Sequence: Synthetic polynucleotide
gatatccagatgacccagagcccttcttccctgtccgcatccgtcggcgatcgtgtcacgattacctgtcgcagcactaagagcctgctgcactcaaacggtatcacgtacctgtactggtaccagcagaagccgggcaaagcgccgaagctgctgatttatcagatgagcaacctggcatcgggcgtgccgagccgtttcagcagcagcggtagcggtaccgacttcacgctgaccatcagctcgttgcagccagaggactttgcgacgtactattgtgcgcaaaacttggaaattccgcgcaccttcggccagggtacgaaagttgagattaaaggtgccaccccaccggagactggtgcagaaaccgagtctccgggcgaaaccacgggcggtagcgcggagagcgaaccgcctggtgagggtcaagttcaattggttcagagcggtccgggtctggttcaaccgggcggcagcgtgcgcatttcttgtgcggccagcggttacacctttacgaactacggtatgaattgggtgaaacaagctccgggcaaaggtctggagtggatgggttggatcaatacctataccggtgaatccacttacgcggattcctttaagggccgtttcaccttcagcctggacacgagcgcgagcgctgcatatctgcaaatcaatagcctgcgtgccgaagataccgcggtgtactattgcgcgcgttttgcaatcaagggcgactattggggtcaaggcacgctgctgaccgtgtcctcaggtggtggcggcagcgagttagttgtgacccaagagccgagcctgaccgttagcccgggtggtacggtcaccctgacgtgccgtagcagcaacggtgcggtcacgagcagcaactatgccaattgggtccagcagaaaccgggtcaagcaccgcgtggcctgatcggcggcaccaataaacgtgccccgggtactcctgcgcgtttctccggtagcctgctgggcggcaaagccgctctgaccctgagcggtgtccagccggaagatgaagcggtgtactactgcgcgctgtggtatccgaatctgtgggtttttggcggcggtaccaagctgaccgtattgggtgctacgccaccggagactggcgcagaaacggaaagcccgggtgagactacgggtggctctgcggagagcgaacctccgggtgagggtgaggtccaactgctggagtctggtggtggcattgttcaaccgggtggctcgttgaagctgagctgtgcagctagcggctttaccttcaacacctatgcgatgaattgggttcgtcaggcaccgggtaagggcctggaatgggtggcgcgtatccgctccaagtacaacaactacgcgacctactacgcggatagcgttaaagaccgcttcacgattagccgtgacgattccaagaatacggtgtatctgcaaatgaacaatctgaaaaccgaagataccgcggtgtattactgtgtgcgccacgaaaatttcggcaacagctacgtgagctggtttgcacattggggtcagggcaccctggttacggtgagctccggcaccgccgaagcagctagcgcctctggcgaatctggtcgtgcagctaacaccgctccagagggtctgactgggcctccaggtagcccagctggtagcccaacctctaccgaagaaggtacctctgaatccgctactccagaatccggtcctggtactagcactgagccaagcgaaggttctgctccaggctccccggcaggtagccctacctctaccgaagagggcactagcaccgaaccatctgagggttccgctcctggcacctccactgaaccgtccgaaggcagtgctccgggtacttccgaaagcgcaactccggaatccggccctggttctgagcctgctacttccggctctgaaactccaggtagcgagccagcgacttctggttctgaaactccaggttcaccggcgggtagcccgacgagcacggaggaaggtacctctgagtcggccactcctgagtccggtccgggcacgagcaccgagccgagcgagggttcagccccgggtaccagcacggagccgtccgagggtagcgcaccgggttctccggcgggctcccctacgtctacggaagagggtacgtccactgaacctagcgagggcagcgcgccaggcaccagcactgaaccgagcgaaggcagcgcacctggcactagcgagtctgcgactccggagagcggtccgggtacgagcacggaaccaagcgaaggcagcgccccaggtacctctgaatctgctaccccagaatctggcccgggttccgagccagctacctctggttctgaaaccccaggtacttccactgaaccaagcgaaggtagcgctcctggcacttctactgaaccatccgaaggttccgctcctggtacgtctgaaagcgctacccctgaaagcggcccaggcacctctgaaagcgctactcctgagagcggtccaggctctccagcaggttctccaacctccactgaagaaggcacctctgagtctgctacccctgaatctggtcctggctccgaacctgctacctctggttccgaaactccaggtacctcggaatctgcgactccggaatctggcccgggcacgagcacggagccgtctgagggtagcgcaccaggtaccagcactgagccttctgagggctctgcaccgggtacctccacggaaccttcggaaggttctgcgccgggtacctccactgagccatccgagggttcagcaccaggtactagcacggaaccgtccgagggctctgcaccaggtacgagcaccgaaccgtcggagggtagcgctccaggtagcccagcgggctctccgacaagcaccgaagaaggcaccagcaccgagccgtccgaaggttccgcaccaggtacaagcgagagcgcgactcctgaatctggtccgggtagcgagcctgcaaccagcggttctgagacgccgggcacttccgaatctgcgaccccggagtccggtccaggttcagagccggcgacgagcggttcggaaacgccgggtacgtctgaatcagccacgccggagtctggtccgggtacctcgaccgaaccaagcgaaggttcggcaccgggtactagcgagagcgcaacccctgaaagcggtccgggcagcccggcaggttctccaaccagcaccgaagaaggttcccctgctggtagcccgacctctacggaggaaggtagccctgcaggttccccaacttctactgaggaaggtacttctgagtccgctaccccagaaagcggtcctggtacctccactgaaccgtctgaaggctctgcaccaggcacttctgagtctgctactccagaaagcggcccaggttctgaaccagcaacttctggctctgagactccaggcacttctgagtccgcaacgcctgaatccggtcctggttctgaaccagctacttccggcagcgaaaccccaggtacctctgagtctgcgactccagagtctggtcctggtacttccactgagcctagcgagggttccgcaccaggttctccggctggtagcccgaccagcacggaggagggtacgtctgaatctgcaacgccggaatcgggcccaggttcggagcctgcaacgtctggcagcgaaaccccgggtacctccgaatctgctacaccggaaagcggtcctggcagccctgctggttctccaacctctaccgaggagggttcaccggcaggtagcccgactagcactgaagaaggtactagcacggagccgagcgagggtagtgctccgggtacgagcgagagcgcaacgccagagagcggtccaggcaccagcgaatcggccacccctgagagcggcccaggtacttctgagagcgccactcctgaatccggccctggtagcgagccggcaacctccggctcagaaactcctggttcggaaccagcgaccagcggttctgaaactccgggtagcccggcaggcagcccaacgagcaccgaagagggtaccagcacggaaccgagcgagggttctgccccgggtacttccaccgaaccatcggagggctctgcacctggtagcgaacctgcgacgtctggttctgaaacgccgggtaccagcgaaagcgctaccccagaatccggtccgggcactagcaccgagccatcggagggctccgcaccaggtcaccatcatcaccatcac

SEQ ID NO: 936 - DNA, 4275 bp, Artificial Sequence
  Description of Artificial Sequence: Synthetic polynucleotide
gatatccagatgacccagagcccttcttccctgtccgcatccgtcggcgatcgtgtcacgattacctgtcgcagcactaagagcctgctgcactcaaacggtatcacgtacctgtactggtaccagcagaagccgggcaaagcgccgaagctgctgatttatcagatgagcaacctggcatcgggcgtgccgagccgtttcagcagcagcggtagcggtaccgacttcacgctgaccatcagctcgttgcagccagaggactttgcgacgtactattgtgcgcaaaacttggaaattccgcgcaccttcggccagggtacgaaagttgagattaaaggtgccaccccaccggagactggtgcagaaaccgagtctccgggcgaaaccacgggcggtagcgcggagagcgaaccgcctggtgagggtcaagttcaattggttcagagcggtccgggtctggttcaaccgggcggcagcgtgcgcatttcttgtgcggccagcggttacacctttacgaactacggtatgaattgggtgaaacaagctccgggcaaaggtctggagtggatgggttggatcaatacctataccggtgaatccacttacgcggattcctttaagggccgtttcaccttcagcctggacacgagcgcgagcgctgcatatctgcaaatcaatagcctgcgtgccgaagataccgcggtgtactattgcgcgcgttttgcaatcaagggcgactattggggtcaaggcacgctgctgaccgtgtcctcaggtggtggcggcagcgagttagttgtgacccaagagccgagcctgaccgttagcccgggtggtacggtcaccctgacgtgccgtagcagcaacggtgaagtcacgaccagcaactatgccaattgggtccagcagaaaccgggtcaagcaccgcgtggcctgatcggcggcaccattaaacgtgccccgggtactcctgcgcgtttctccggtagcctgctgggcggcaaagccgctctgaccctgagcggtgtccagccggaagatgaagcggtgtactactgcgcgctgtggtatccgaatctgtgggtttttggcggcggtaccaagctgaccgtattgggtgctacgccaccggagactggcgcagaaacggaaagcccgggtgagactacgggtggctctgcggagagcgaacctccgggtgagggtgaggtccaactgctggagtctggtggtggcattgttcaaccgggtggctcgttgaagctgagctgtgcagctagcggctttaccttcaacacctatgcgatgaattgggttcgtcaggcaccgggtaagggcctggaatgggtggcgcgtatccgctccaagtacaacaactacgcgacctactacgcggatagcgttaaagaccgcttcacgattagccgtgacgattccaagaatacggtgtatctgcaaatgaacaatctgaaaaccgaagataccgcggtgtattactgtgtgcgccacgaaaatttcggcaacagctacgtgagctggtttgcacattggggtcagggcaccctggttacggtgagctccggcaccgccgaagcagctagcgcctctggcgaatctggtcgtgcagctaacaccgctccagagggtctgactgggcctccaggtagcccagctggtagcccaacctctaccgaagaaggtacctctgaatccgctactccagaatccggtcctggtactagcactgagccaagcgaaggttctgctccaggctccccggcaggtagccctacctctaccgaagagggcactagcaccgaaccatctgagggttccgctcctggcacctccactgaaccgtccgaaggcagtgctccgggtacttccgaaagcgcaactccggaatccggccctggttctgagcctgctacttccggctctgaaactccaggtagcgagccagcgacttctggttctgaaactccaggttcaccggcgggtagcccgacgagcacggaggaaggtacctctgagtcggccactcctgagtccggtccgggcacgagcaccgagccgagcgagggttcagccccgggtaccagcacggagccgtccgagggtagcgcaccgggttctccggcgggctcccctacgtctacggaagagggtacgtccactgaacctagcgagggcagcgcgccaggcaccagcactgaaccgagcgaaggcagcgcacctggcactagcgagtctgcgactccggagagcggtccgggtacgagcacggaaccaagcgaaggcagcgccccaggtacctctgaatctgctaccccagaatctggcccgggttccgagccagctacctctggttctgaaaccccaggtacttccactgaaccaagcgaaggtagcgctcctggcacttctactgaaccatccgaaggttccgctcctggtacgtctgaaagcgctacccctgaaagcggcccaggcacctctgaaagcgctactcctgagagcggtccaggctctccagcaggttctccaacctccactgaagaaggcacctctgagtctgctacccctgaatctggtcctggctccgaacctgctacctctggttccgaaactccaggtacctcggaatctgcgactccggaatctggcccgggcacgagcacggagccgtctgagggtagcgcaccaggtaccagcactgagccttctgagggctctgcaccgggtacctccacggaaccttcggaaggttctgcgccgggtacctccactgagccatccgagggttcagcaccaggtactagcacggaaccgtccgagggctctgcaccaggtacgagcaccgaaccgtcggagggtagcgctccaggtagcccagcgggctctccgacaagcaccgaagaaggcaccagcaccgagccgtccgaaggttccgcaccaggtacaagcgagagcgcgactcctgaatctggtccgggtagcgagcctgcaaccagcggttctgagacgccgggcacttccgaatctgcgaccccggagtccggtccaggttcagagccggcgacgagcggttcggaaacgccgggtacgtctgaatcagccacgccggagtctggtccgggtacctcgaccgaaccaagcgaaggttcggcaccgggtactagcgagagcgcaacccctgaaagcggtccgggcagcccggcaggttctccaaccagcaccgaagaaggttcccctgctggtagcccgacctctacggaggaaggtagccctgcaggttccccaacttctactgaggaaggtacttctgagtccgctaccccagaaagcggtcctggtacctccactgaaccgtctgaaggctctgcaccaggcacttctgagtctgctactccagaaagcggcccaggttctgaaccagcaacttctggctctgagactccaggcacttctgagtccgcaacgcctgaatccggtcctggttctgaaccagctacttccggcagcgaaaccccaggtacctctgagtctgcgactccagagtctggtcctggtacttccactgagcctagcgagggttccgcaccaggttctccggctggtagcccgaccagcacggaggagggtacgtctgaatctgcaacgccggaatcgggcccaggttcggagcctgcaacgtctggcagcgaaaccccgggtacctccgaatctgctacaccggaaagcggtcctggcagccctgctggttctccaacctctaccgaggagggttcaccggcaggtagcccgactagcactgaagaaggtactagcacggagccgagcgagggtagtgctccgggtacgagcgagagcgcaacgccagagagcggtccaggcaccagcgaatcggccacccctgagagcggcccaggtacttctgagagcgccactcctgaatccggccctggtagcgagccggcaacctccggctcagaaactcctggttcggaaccagcgaccagcggttctgaaactccgggtagcccggcaggcagcccaacgagcaccgaagagggtaccagcacggaaccgagcgagggttctgccccgggtacttccaccgaaccatcggagggctctgcacctggtagcgaacctgcgacgtctggttctgaaacgccgggtaccagcgaaagcgctaccccagaatccggtccgggcactagcaccgagccatcggagggctccgcaccaggtcaccatcatcaccatcac

SEQ ID NO: 937 - DNA, 4275 bp, Artificial Sequence
  Description of Artificial Sequence: Synthetic polynucleotide
gatatccagatgacccagagcccttcttccctgtccgcatccgtcggcgatcgtgtcacgattacctgtcgcagcactaagagcctgctgcactcaaacggtatcacgtacctgtactggtaccagcagaagccgggcaaagcgccgaagctgctgatttatcagatgagcaacctggcatcgggcgtgccgagccgtttcagcagcagcggtagcggtaccgacttcacgctgaccatcagctcgttgcagccagaggactttgcgacgtactattgtgcgcaaaacttggaaattccgcgcaccttcggccagggtacgaaagttgagattaaaggtgccaccccaccggagactggtgcagaaaccgagtctccgggcgaaaccacgggcggtagcgcggagagcgaaccgcctggtgagggtcaagttcaattggttcagagcggtccgggtctggttcaaccgggcggcagcgtgcgcatttcttgtgcggccagcggttacacctttacgaactacggtatgaattgggtgaaacaagctccgggcaaaggtctggagtggatgggttggatcaatacctataccggtgaatccacttacgcggattcctttaagggccgtttcaccttcagcctggacacgagcgcgagcgctgcatatctgcaaatcaatagcctgcgtgccgaagataccgcggtgtactattgcgcgcgttttgcaatcaagggcgactattggggtcaaggcacgctgctgaccgtgtcctcaggtggtggcggcagcgagttagttgtgacccaagagccgagccataccgttagcccgggtggtacggtcaccctgacgtgccgtagcagcaccggtgcggtcacgagcagcaactatgccaattgggtccagcagaaaccgggtcaagcaccgcgtggcctgatcggcggcaccattaaacgtgccccgggtactcctgcgcgtttctccggtagcctgctgggcggcaaagccgctctgaccctgagcggtgtccagccggaagatgaagcggagtactactgcgcgctgtggtatccgaatctgtgggtttttggcggcggtaccaagctgaccgtattgggtgctacgccaccggagactggcgcagaaacggaaagcccgggtgagactacgggtggctctgcggagagcgaacctccgggtgagggtgaggtccaactgctggagtctggtggtggcattgttcaaccgggtggctcgttgaagctgagctgtgcagctagcggctttaccttcaacacctatgcgatgaattgggttcgtcaggcaccgggtaagggcctggaatgggtggcgcgtatccgctccaagtacaacaactacgcgacctactacgcggatagcgttaaagaccgcttcacgattagccgtgacgattccaagaatacggtgtatctgcaaatgaacaatctgaaaaccgaagataccgcggtgtattactgtgtgcgccacgaaaatttcggcaacagctacgtgagctggtttgcacattggggtcagggcaccctggttacggtgagctccggcaccgccgaagcagctagcgcctctggcgaatctggtcgtgcagctaacaccgctccagagggtctgactgggcctccaggtagcccagctggtagcccaacctctaccgaagaaggtacctctgaatccgctactccagaatccggtcctggtactagcactgagccaagcgaaggttctgctccaggctccccggcaggtagccctacctctaccgaagagggcactagcaccgaaccatctgagggttccgctcctggcacctccactgaaccgtccgaaggcagtgctccgggtacttccgaaagcgcaactccggaatccggccctggttctgagcctgctacttccggctctgaaactccaggtagcgagccagcgacttctggttctgaaactccaggttcaccggcgggtagcccgacgagcacggaggaaggtacctctgagtcggccactcctgagtccggtccgggcacgagcaccgagccgagcgagggttcagccccgggtaccagcacggagccgtccgagggtagcgcaccgggttctccggcgggctcccctacgtctacggaagagggtacgtccactgaacctagcgagggcagcgcgccaggcaccagcactgaaccgagcgaaggcagcgcacctggcactagcgagtctgcgactccggagagcggtccgggtacgagcacggaaccaagcgaaggcagcgccccaggtacctctgaatctgctaccccagaatctggcccgggttccgagccagctacctctggttctgaaaccccaggtacttccactgaaccaagcgaaggtagcgctcctggcacttctactgaaccatccgaaggttccgctcctggtacgtctgaaagcgctacccctgaaagcggcccaggcacctctgaaagcgctactcctgagagcggtccaggctctccagcaggttctccaacctccactgaagaaggcacctctgagtctgctacccctgaatctggtcctggctccgaacctgctacctctggttccgaaactccaggtacctcggaatctgcgactccggaatctggcccgggcacgagcacggagccgtctgagggtagcgcaccaggtaccagcactgagccttctgagggctctgcaccgggtacctccacggaaccttcggaaggttctgcgccgggtacctccactgagccatccgagggttcagcaccaggtactagcacggaaccgtccgagggctctgcaccaggtacgagcaccgaaccgtcggagggtagcgctccaggtagcccagcgggctctccgacaagcaccgaagaaggcaccagcaccgagccgtccgaaggttccgcaccaggtacaagcgagagcgcgactcctgaatctggtccgggtagcgagcctgcaaccagcggttctgagacgccgggcacttccgaatctgcgaccccggagtccggtccaggttcagagccggcgacgagcggttcggaaacgccgggtacgtctgaatcagccacgccggagtctggtccgggtacctcgaccgaaccaagcgaaggttcggcaccgggtactagcgagagcgcaacccctgaaagcggtccgggcagcccggcaggttctccaaccagcaccgaagaaggttcccctgctggtagcccgacctctacggaggaaggtagccctgcaggttccccaacttctactgaggaaggtacttctgagtccgctaccccagaaagcggtcctggtacctccactgaaccgtctgaaggctctgcaccaggcacttctgagtctgctactccagaaagcggcccaggttctgaaccagcaacttctggctctgagactccaggcacttctgagtccgcaacgcctgaatccggtcctggttctgaaccagctacttccggcagcgaaaccccaggtacctctgagtctgcgactccagagtctggtcctggtacttccactgagcctagcgagggttccgcaccaggttctccggctggtagcccgaccagcacggaggagggtacgtctgaatctgcaacgccggaatcgggcccaggttcggagcctgcaacgtctggcagcgaaaccccgggtacctccgaatctgctacaccggaaagcggtcctggcagccctgctggttctccaacctctaccgaggagggttcaccggcaggtagcccgactagcactgaagaaggtactagcacggagccgagcgagggtagtgctccgggtacgagcgagagcgcaacgccagagagcggtccaggcaccagcgaatcggccacccctgagagcggcccaggtacttctgagagcgccactcctgaatccggccctggtagcgagccggcaacctccggctcagaaactcctggttcggaaccagcgaccagcggttctgaaactccgggtagcccggcaggcagcccaacgagcaccgaagagggtaccagcacggaaccgagcgagggttctgccccgggtacttccaccgaaccatcggagggctctgcacctggtagcgaacctgcgacgtctggttctgaaacgccgggtaccagcgaaagcgctaccccagaatccggtccgggcactagcaccgagccatcggagggctccgcaccaggtcaccatcatcaccatcac

SEQ ID NO: 938 - DNA, 4275 bp, Artificial Sequence
  Description of Artificial Sequence: Synthetic polynucleotide
gatatccagatgacccagagcccttcttccctgtccgcatccgtcggcgatcgtgtcacgattacctgtcgcagcactaagagcctgctgcactcaaacggtatcacgtacctgtactggtaccagcagaagccgggcaaagcgccgaagctgctgatttatcagatgagcaacctggcatcgggcgtgccgagccgtttcagcagcagcggtagcggtaccgacttcacgctgaccatcagctcgttgcagccagaggactttgcgacgtactattgtgcgcaaaacttggaaattccgcgcaccttcggccagggtacgaaagttgagattaaaggtgccaccccaccggagactggtgcagaaaccgagtctccgggcgaaaccacgggcggtagcgcggagagcgaaccgcctggtgagggtcaagttcaattggttcagagcggtccgggtctggttcaaccgggcggcagcgtgcgcatttcttgtgcggccagcggttacacctttacgaactacggtatgaattgggtgaaacaagctccgggcaaaggtctggagtggatgggttggatcaatacctataccggtgaatccacttacgcggattcctttaagggccgtttcaccttcagcctggacacgagcgcgagcgctgcatatctgcaaatcaatagcctgcgtgccgaagataccgcggtgtactattgcgcgcgttttgcaatcaagggcgactattggggtcaaggcacgctgctgaccgtgtcctcaggtggtggcggcagcgagttagttgtgacccaagagccgagccataccgttagcccgggtggtacggtcaccctgacgtgccgtagcagcaccggtgaagtcacgaccagcaactatgccaattgggtccagcagaaaccgggtcaagcaccgcgtggcctgatcggcggcaccattaaacgtgccccgggtactcctgcgcgtttctccggtagcctgctgggcggcaaagccgctctgaccctgagcggtgtccagccggaagatgaagcggagtactactgcgcgctgtggtatccgaatctgtgggtttttggcggcggtaccaagctgaccgtattgggtgctacgccaccggagactggcgcagaaacggaaagcccgggtgagactacgggtggctctgcggagagcgaacctccgggtgagggtgaggtccaactgctggagtctggtggtggcattgttcaaccgggtggctcgttgaagctgagctgtgcagctagcggctttaccttcaacacctatgcgatgaattgggttcgtcaggcaccgggtaagggcctggaatgggtggcgcgtatccgctccaagtacaacaactacgcgacctactacgcggatagcgttaaagaccgcttcacgattagccgtgacgattccaagaatacggtgtatctgcaaatgaacaatctgaaaaccgaagataccgcggtgtattactgtgtgcgccacgaaaatttcggcaacagctacgtgagctggtttgcacattggggtcagggcaccctggttacggtgagctccggcaccgccgaagcagctagcgcctctggcgaatctggtcgtgcagctaacaccgctccagagggtctgactgggcctccaggtagcccagctggtagcccaacctctaccgaagaaggtacctctgaatccgctactccagaatccggtcctggtactagcactgagccaagcgaaggttctgctccaggctccccggcaggtagccctacctctaccgaagagggcactagcaccgaaccatctgagggttccgctcctggcacctccactgaaccgtccgaaggcagtgctccgggtacttccgaaagcgcaactccggaatccggccctggttctgagcctgctacttccggctctgaaactccaggtagcgagccagcgacttctggttctgaaactccaggttcaccggcgggtagcccgacgagcacggaggaaggtacctctgagtcggccactcctgagtccggtccgggcacgagcaccgagccgagcgagggttcagccccgggtaccagcacggagccgtccgagggtagcgcaccgggttctccggcgggctcccctacgtctacggaagagggtacgtccactgaacctagcgagggcagcgcgccaggcaccagcactgaaccgagcgaaggcagcgcacctggcactagcgagtctgcgactccggagagcggtccgggtacgagcacggaaccaagcgaaggcagcgccccaggtacctctgaatctgctaccccagaatctggcccgggttccgagccagctacctctggttctgaaaccccaggtacttccactgaaccaagcgaaggtagcgctcctggcacttctactgaaccatccgaaggttccgctcctggtacgtctgaaagcgctacccctgaaagcggcccaggcacctctgaaagcgctactcctgagagcggtccaggctctccagcaggttctccaacctccactgaagaaggcacctctgagtctgctacccctgaatctggtcctggctccgaacctgctacctctggttccgaaactccaggtacctcggaatctgcgactccggaatctggcccgggcacgagcacggagccgtctgagggtagcgcaccaggtaccagcactgagccttctgagggctctgcaccgggtacctccacggaaccttcggaaggttctgcgccgggtacctccactgagccatccgagggttcagcaccaggtactagcacggaaccgtccgagggctctgcaccaggtacgagcaccgaaccgtcggagggtagcgctccaggtagcccagcgggctctccgacaagcaccgaagaaggcaccagcaccgagccgtccgaaggttccgcaccaggtacaagcgagagcgcgactcctgaatctggtccgggtagcgagcctgcaaccagcggttctgagacgccgggcacttccgaatctgcgaccccggagtccggtccaggttcagagccggcgacgagcggttcggaaacgccgggtacgtctgaatcagccacgccggagtctggtccgggtacctcgaccgaaccaagcgaaggttcggcaccgggtactagcgagagcgcaacccctgaaagcggtccgggcagcccggcaggttctccaaccagcaccgaagaaggttcccctgctggtagcccgacctctacggaggaaggtagccctgcaggttccccaacttctactgaggaaggtacttctgagtccgctaccccagaaagcggtcctggtacctccactgaaccgtctgaaggctctgcaccaggcacttctgagtctgctactccagaaagcggcccaggttctgaaccagcaacttctggctctgagactccaggcacttctgagtccgcaacgcctgaatccggtcctggttctgaaccagctacttccggcagcgaaaccccaggtacctctgagtctgcgactccagagtctggtcctggtacttccactgagcctagcgagggttccgcaccaggttctccggctggtagcccgaccagcacggaggagggtacgtctgaatctgcaacgccggaatcgggcccaggttcggagcctgcaacgtctggcagcgaaaccccgggtacctccgaatctgctacaccggaaagcggtcctggcagccctgctggttctccaacctctaccgaggagggttcaccggcaggtagcccgactagcactgaagaaggtactagcacggagccgagcgagggtagtgctccgggtacgagcgagagcgcaacgccagagagcggtccaggcaccagcgaatcggccacccctgagagcggcccaggtacttctgagagcgccactcctgaatccggccctggtagcgagccggcaacctccggctcagaaactcctggttcggaaccagcgaccagcggttctgaaactccgggtagcccggcaggcagcccaacgagcaccgaagagggtaccagcacggaaccgagcgagggttctgccccgggtacttccaccgaaccatcggagggctctgcacctggtagcgaacctgcgacgtctggttctgaaacgccgggtaccagcgaaagcgctaccccagaatccggtccgggcactagcaccgagccatcggagggctccgcaccaggtcaccatcatcaccatcac

SEQ ID NO: 939 - DNA, 5229 bp, Artificial Sequence
  Description of Artificial Sequence: Synthetic polynucleotide
caccatcatcaccatcactccccagcaggcagcccgaccagcaccgaggagggtacgagcgagtcggctactccagagagcggtccgggtacctctacggaaccgtccgaaggtagcgctccaggcacgtctgaaagcgcgacgccggaaagcggtccaggcagcgagccggcgacctccggtagcgaaacgcctggtacctcggagtcagcgactccggaaagcggtccgggtagcgaacctgcaacgagcggtagcgagactccaggcactagcgaatccgcaactccggagtcgggtccgggcacctctacggagcctagcgagggctcagcaccaggtagccctgcaggttccccgacgtcaaccgaggaaggtacaagcgaaagcgccacccctgagtcgggccctggcagcgaaccggcaactagcggcagcgagactccgggtaccagcgagtctgctacgccagagagcggcccaggttcgccagcgggttcgccgactagcacggaggagggcagcccagcgggtagcccgaccagcactgaggagggtacgtccaccgaaccgagcgaaggtagcgcaccaggtacctccgagtctgccacccctgaatccggtccaggtaccagcgaatcagccaccccggagtcgggtccaggtacgagcgaatctgctaccccggaatccggcccaggcagcgaacctgctactagcggcagcgaaacgccgggcagcgaacctgccacgtcaggcagcgagacgccgggttcccctgcaggctccccgaccagcactgaggagggcacctccaccgaaccatcagaaggtagcgcgcctggtacgtcaaccgaaccttccgagggcagcgcaccgggtggctcagcgcctgaggcaggtcgttctgctaaccatacccctgcaggattaactggccccgccaccagcgggagcgagacccccgggactgacattcagatgactcagtctccgtcctccctgtctgcgagcgtgggcgaccgtgtgactattacctgtaaagcctcccaggacgtgtctatcggtgtggcatggtatcaacaaaagccgggtaaggcacctaaactgctgatctactccgcttcttaccgttacacgggcgttccgtcccgttttagcggttccggtagcggtactgattttaccctgactatttcctccctgcaaccagaagactttgcgacctattactgtcagcaatactatatttacccgtataccttcggccagggcactaaggttgaaattaaaggtgcaacgcctccggagactggtgctgaaactgagtccccgggcgagacgaccggtggctctgctgaatccgaaccaccgggcgaaggcgaggttcagctggtggagtctggcggcggtctggtacagccgggtggtagcctgcgtctgagctgcgcggcgtccggtttcactttcaccgattataccatggactgggttcgccaggcaccgggcaagggtctggaatgggtggcggacgtgaacccgaactccggtggttctatctacaaccagcgtttcaaaggtcgtttcacgctgagcgtagatcgtagcaaaaacactctgtacctgcagatgaactccctgcgcgcagaagacaccgcggtgtattactgtgcacgtaacctgggcccgtccttctatttcgactactggggtcaaggtactctggtaactgtttcctctggtggtggcggcagcgagttagttgtgacccaagagccgagcctgaccgttagcccgggtggtacggtcaccctgacgtgccgtagcagcaacggtgcggtcacgagcagcaactatgccaattgggtccagcagaaaccgggtcaagcaccgcgtggcctgatcggcggcaccaataaacgtgccccgggtactcctgcgcgtttctccggtagcctgctgggcggcaaagccgctctgaccctgagcggtgtccagccggaagatgaagcggtgtactactgcgcgctgtggtatccgaatctgtgggtttttggcggcggtaccaagctgaccgtattgggtgctacgccaccggagactggcgcagaaacggaaagcccgggtgagactacgggtggctctgcggagagcgaacctccgggtgagggtgaggtccaactgctggagtctggtggtggcattgttcaaccgggtggctcgttgaagctgagctgtgcagctagcggctttaccttcaacacctatgcgatgaattgggttcgtcaggcaccgggtaagggcctggaatgggtggcgcgtatccgctccaagtacaacaactacgcgacctactacgcggatagcgttaaagaccgcttcacgattagccgtgacgattccaagaatacggtgtatctgcaaatgaacaatctgaaaaccgaagataccgcggtgtattactgtgtgcgccacgaaaatttcggcaacagctacgtgagctggtttgcacattggggtcagggcaccctggttacggtgagctccgggactgctgaggcggctagcgcctccggagaagctggaagaagcgccaatcacacaccagctggacttacaggcccgcctggtagccccgcggggagccctacaagcactgaggagggcacatctgagtccgctacccctgagagtggacccgggacaagcactgagcctagcgaaggaagcgcaccaggttcccccgctgggagccccacaagcacagaagagggaacttctaccgagccctctgagggctcagcccctggaactagcacagagccctccgaaggcagtgcaccgggtacttccgaaagcgcaactccggaatccggccctggttctgagcctgctacttccggctctgaaactccaggtagcgagccagcgacttctggttctgaaactccaggttcaccggcgggtagcccgacgagcacggaggaaggtacctctgagtcggccactcctgagtccggtccgggcacgagcaccgagccgagcgagggttcagccccgggtaccagcacggagccgtccgagggtagcgcaccgggttctccggcgggctcccctacgtctacggaagagggtacgtccactgaacctagcgagggcagcgcgccaggcaccagcactgaaccgagcgaaggcagcgcacctggcactagcgagtctgcgactccggagagcggtccgggtacgagcacggaaccaagcgaaggcagcgccccaggtacctctgaatctgctaccccagaatctggcccgggttccgagccagctacctctggttctgaaaccccaggtacttccactgaaccaagcgaaggtagcgctcctggcacttctactgaaccatccgaaggttccgctcctggtacgtctgaaagcgctacccctgaaagcggcccaggcacctctgaaagcgctactcctgagagcggtccaggctctccagcaggttctccaacctccactgaagaaggcacctctgagtctgctacccctgaatctggtcctggctccgaacctgctacctctggttccgaaactccaggtacctcggaatctgcgactccggaatctggcccgggcacgagcacggagccgtctgagggtagcgcaccaggtaccagcactgagccttctgagggctctgcaccgggtacctccacggaaccttcggaaggttctgcgccgggtacctccactgagccatccgagggttcagcaccaggtactagcacggaaccgtccgagggctctgcaccaggtacgagcaccgaaccgtcggagggtagcgctccaggtagcccagcgggctctccgacaagcaccgaagaaggcaccagcaccgagccgtccgaaggttccgcaccaggtacaagcgagagcgcgactcctgaatctggtccgggtagcgagcctgcaaccagcggttctgagacgccgggcacttccgaatctgcgaccccggagtccggtccaggttcagagccggcgacgagcggttcggaaacgccgggtacgtctgaatcagccacgccggagtctggtccgggtacctcgaccgaaccaagcgaaggttcggcaccgggtactagcgagagcgcaacccctgaaagcggtccgggcagcccggcaggttctccaaccagcaccgaagaaggttcccctgctggtagcccgacctctacggaggaaggtagccctgcaggttccccaacttctactgaggaaggtacttctgagtccgctaccccagaaagcggtcctggtacctccactgaaccgtctgaaggctctgcaccaggcacttctgagtctgctactccagaaagcggcccaggttctgaaccagcaacttctggctctgagactccaggcacttctgagtccgcaacgcctgaatccggtcctggttctgaaccagctacttccggcagcgaaaccccaggtacctctgagtctgcgactccagagtctggtcctggtacttccactgagcctagcgagggttccgcaccaggttctccggctggtagcccgaccagcacggaggagggtacgtctgaatctgcaacgccggaatcgggcccaggttcggagcctgcaacgtctggcagcgaaaccccgggtacctccgaatctgctacaccggaaagcggtcctggcagccctgctggttctccaacctctaccgaggagggttcaccggcaggtagcccgactagcactgaagaaggtactagcacggagccgagcgagggtagtgctccgggtacgagcgagagcgcaacgccagagagcggtccaggcaccagcgaatcggccacccctgagagcggcccaggtacttctgagagcgccactcctgaatccggccctggtagcgagccggcaacctccggctcagaaactcctggttcggaaccagcgaccagcggttctgaaactccgggtagcccggcaggcagcccaacgagcaccgaagagggtaccagcacggaaccgagcgagggttctgccccgggtacttccaccgaaccatcggagggctctgcacctggtagcgaacctgcgacgtctggttctgaaacgccgggtaccagcgaaagcgctaccccagaatccggtccgggcactagcaccgagccatcggagggcgccgcagaaccagaggcg

SEQ ID NO: 940 - DNA, 5229 bp, Artificial Sequence
  Description of Artificial Sequence: Synthetic polynucleotide
caccatcatcaccatcactccccagcaggcagcccgaccagcaccgaggagggtacgagcgagtcggctactccagagagcggtccgggtacctctacggaaccgtccgaaggtagcgctccaggcacgtctgaaagcgcgacgccggaaagcggtccaggcagcgagccggcgacctccggtagcgaaacgcctggtacctcggagtcagcgactccggaaagcggtccgggtagcgaacctgcaacgagcggtagcgagactccaggcactagcgaatccgcaactccggagtcgggtccgggcacctctacggagcctagcgagggctcagcaccaggtagccctgcaggttccccgacgtcaaccgaggaaggtacaagcgaaagcgccacccctgagtcgggccctggcagcgaaccggcaactagcggcagcgagactccgggtaccagcgagtctgctacgccagagagcggcccaggttcgccagcgggttcgccgactagcacggaggagggcagcccagcgggtagcccgaccagcactgaggagggtacgtccaccgaaccgagcgaaggtagcgcaccaggtacctccgagtctgccacccctgaatccggtccaggtaccagcgaatcagccaccccggagtcgggtccaggtacgagcgaatctgctaccccggaatccggcccaggcagcgaacctgctactagcggcagcgaaacgccgggcagcgaacctgccacgtcaggcagcgagacgccgggttcccctgcaggctccccgaccagcactgaggagggcacctccaccgaaccatcagaaggtagcgcgcctggtacgtcaaccgaaccttccgagggcagcgcaccgggtggctcagcgcctgaggcaggtcgttctgctaaccatacccctgcaggattaactggccccgccaccagcgggagcgagacccccgggactgatatccagatgacccaaagccctagttcattaagcgcatcggtgggtgaccgggtaaccattacctgtcaagcaagtcaggatatcagcaactacctgaactggtaccagcagaaacccggaaaagcgccgaaactgctgatctatgatgccagcaatctggaaacaggtgttcctagccgtttctctggatcaggttcaggaaccgattttacattcaccattagctcattacagccggaggatatcgcgacgtatttttgccagcacttcgatcatctgcctttagcatttggcggcggtactaaagtggagatcaaaggagcgacgccgcctgagactggagcagagaccgaatcacctggtgagacgacgggcgggtcagccgaaagcgagccaccgggggaagggcaggttcaattgcaagaaagtggaccgggcttagtcaaacccagcgaaaccctctccctgacctgcacagtcagcggagggtctgtgagctcaggcgactactattggacctggattagacaatcaccaggtaaaggtcttgagtggattggccacatctactatagcggtaacaccaactataatccgagcctgaaaagtcgtctgaccatcagcatcgacaccagcaaaacccagtttagcctgaaattaagcagcgttacagcagcggatacagcgatttactattgtgtccgtgatcgcgttactggcgcatttgatatttgggggcagggaacaatggttactgtgtcaagtggaggaggtggcagtgagttagttgtgacccaagagccgagcctgaccgttagcccgggtggtacggtcaccctgacgtgccgtagcagcaacggtgcggtcacgagcagcaactatgccaattgggtccagcagaaaccgggtcaagcaccgcgtggcctgatcggcggcaccaataaacgtgccccgggtactcctgcgcgtttctccggtagctcactgggcggctcagccgctctgaccctgagcggtgtccagccggaagatgaagcggtgtactactgcgcgctgtggtatccgaatctgtgggtttttggcggcggtaccaagctgaccgtattgggtgctacgccaccggagactggcgcagaaacggaaagcccgggtgagactacgggtggctctgcggagagcgaacctccgggtgagggtgaggtccaactgcaggagtctggtggtggcattgttcaaccgggtggctcgttgaagctgagctgtgcagctagcggctttaccttcaacacctatgcgatgaattgggttcgtcaggcaccgggtaagggcctggaatgggtggcgcgtatccgctccaagtacaacaactacgcgacctactacgcggatagcgttaaagaccgcttcacgattagccgtgacgattccaagaatacggtgtatctgcaaatgaacaatctgaaaaccgaagataccgcggtgtattactgtgtgcgccacgaaaatttcggcaacagctacgtgagctggtttgcacattggggtcagggcaccctggttacggtgagctccgggactgctgaggcggctagcgcctccggagaagctggaagaagcgccaatcacacaccagctggacttacaggcccgcctggtagccccgcggggagccctacaagcactgaggagggcacatctgagtccgctacccctgagagtggacccgggacaagcactgagcctagcgaaggaagcgcaccaggttcccccgctgggagccccacaagcacagaagagggaacttctaccgagccctctgagggctcagcccctggaactagcacagagccctccgaaggcagtgcaccgggtacttccgaaagcgcaactccggaatccggccctggttctgagcctgctacttccggctctgaaactccaggtagcgagccagcgacttctggttctgaaactccaggttcaccggcgggtagcccgacgagcacggaggaaggtacctctgagtcggccactcctgagtccggtccgggcacgagcaccgagccgagcgagggttcagccccgggtaccagcacggagccgtccgagggtagcgcaccgggttctccggcgggctcccctacgtctacggaagagggtacgtccactgaacctagcgagggcagcgcgccaggcaccagcactgaaccgagcgaaggcagcgcacctggcactagcgagtctgcgactccggagagcggtccgggtacgagcacggaaccaagcgaaggcagcgccccaggtacctctgaatctgctaccccagaatctggcccgggttccgagccagctacctctggttctgaaaccccaggtacttccactgaaccaagcgaaggtagcgctcctggcacttctactgaaccatccgaaggttccgctcctggtacgtctgaaagcgctacccctgaaagcggcccaggcacctctgaaagcgctactcctgagagcggtccaggctctccagcaggttctccaacctccactgaagaaggcacctctgagtctgctacccctgaatctggtcctggctccgaacctgctacctctggttccgaaactccaggtacctcggaatctgcgactccggaatctggcccgggcacgagcacggagccgtctgagggtagcgcaccaggtaccagcactgagccttctgagggctctgcaccgggtacctccacggaaccttcggaaggttctgcgccgggtacctccactgagccatccgagggttcagcaccaggtactagcacggaaccgtccgagggctctgcaccaggtacgagcaccgaaccgtcggagggtagcgctccaggtagcccagcgggctctccgacaagcaccgaagaaggcaccagcaccgagccgtccgaaggttccgcaccaggtacaagcgagagcgcgactcctgaatctggtccgggtagcgagcctgcaaccagcggttctgagacgccgggcacttccgaatctgcgaccccggagtccggtccaggttcagagccggcgacgagcggttcggaaacgccgggtacgtctgaatcagccacgccggagtctggtccgggtacctcgaccgaaccaagcgaaggttcggcaccgggtactagcgagagcgcaacccctgaaagcggtccgggcagcccggcaggttctccaaccagcaccgaagaaggttcccctgctggtagcccgacctctacggaggaaggtagccctgcaggttccccaacttctactgaggaaggtacttctgagtccgctaccccagaaagcggtcctggtacctccactgaaccgtctgaaggctctgcaccaggcacttctgagtctgctactccagaaagcggcccaggttctgaaccagcaacttctggctctgagactccaggcacttctgagtccgcaacgcctgaatccggtcctggttctgaaccagctacttccggcagcgaaaccccaggtacctctgagtctgcgactccagagtctggtcctggtacttccactgagcctagcgagggttccgcaccaggttctccggctggtagcccgaccagcacggaggagggtacgtctgaatctgcaacgccggaatcgggcccaggttcggagcctgcaacgtctggcagcgaaaccccgggtacctccgaatctgctacaccggaaagcggtcctggcagccctgctggttctccaacctctaccgaggagggttcaccggcaggtagcccgactagcactgaagaaggtactagcacggagccgagcgagggtagtgctccgggtacgagcgagagcgcaacgccagagagcggtccaggcaccagcgaatcggccacccctgagagcggcccaggtacttctgagagcgccactcctgaatccggccctggtagcgagccggcaacctccggctcagaaactcctggttcggaaccagcgaccagcggttctgaaactccgggtagcccggcaggcagcccaacgagcaccgaagagggtaccagcacggaaccgagcgagggttctgccccgggtacttccaccgaaccatcggagggctctgcacctggtagcgaacctgcgacgtctggttctgaaacgccgggtaccagcgaaagcgctaccccagaatccggtccgggcactagcaccgagccatcggagggcgccgcagaaccagaggcg

SEQ ID NO: 941 - DNA, 5229 bp, Artificial Sequence
  Description of Artificial Sequence: Synthetic polynucleotide
caccatcatcaccatcactccccagcaggcagcccgaccagcaccgaggagggtacgagcgagtcggctactccagagagcggtccgggtacctctacggaaccgtccgaaggtagcgctccaggcacgtctgaaagcgcgacgccggaaagcggtccaggcagcgagccggcgacctccggtagcgaaacgcctggtacctcggagtcagcgactccggaaagcggtccgggtagcgaacctgcaacgagcggtagcgagactccaggcactagcgaatccgcaactccggagtcgggtccgggcacctctacggagcctagcgagggctcagcaccaggtagccctgcaggttccccgacgtcaaccgaggaaggtacaagcgaaagcgccacccctgagtcgggccctggcagcgaaccggcaactagcggcagcgagactccgggtaccagcgagtctgctacgccagagagcggcccaggttcgccagcgggttcgccgactagcacggaggagggcagcccagcgggtagcccgaccagcactgaggagggtacgtccaccgaaccgagcgaaggtagcgcaccaggtacctccgagtctgccacccctgaatccggtccaggtaccagcgaatcagccaccccggagtcgggtccaggtacgagcgaatctgctaccccggaatccggcccaggcagcgaacctgctactagcggcagcgaaacgccgggcagcgaacctgccacgtcaggcagcgagacgccgggttcccctgcaggctccccgaccagcactgaggagggcacctccaccgaaccatcagaaggtagcgcgcctggtacgtcaaccgaaccttccgagggcagcgcaccgggtggctcagcgcctgaggcaggtcgttctgctaaccatacccctgcaggattaactggccccgccaccagcgggagcgagacccccgggactgatatccagatgacccaaagccctagttcattaagcgcatcggtgggtgaccgggtaaccattacctgtcaagcaagtcaggatatcagcaactacctgaactggtaccagcagaaacccggaaaagcgccgaaactgctgatctatgatgccagcaatctggaaacaggtgttcctagccgtttctctggatcaggttcaggaaccgattttacattcaccattagccgtttacagccggaggataccgcgacgtatttttgccagcacttcgatcatctgcctttagcatttggcggcggtactaaagtggagatcaaaggagcgacgccgcctgagactggagcagagaccgaatcacctggtgagacgacgggcgggtcagccgaaagcgagccaccgggggaagggcaggttcaattgcaagaaagtggaccgggcgccgtcaaacccagcgaaaccctctccctgacctgcacagtcagcggagggtctgtgagctcaggcgactactattggacctggattagacaatcaccaggtaaaggtcttgagtggattggccacatctactatagcggtaacaccaactataatccgagcctgaaaagtcgtctgaccatcagcatcgacaccagcaaaacccagtttagcctgaaattaagcagcgttacagcagcggatacagcgacctactattgtgtccgtgatcgcgttactggcgcatttgatatttgggggcagggaacagcagttactgtgtcaagcggaggaggtggcagtgagttagttgtgacccaagagccgagcctgaccgttagcccgggtggtacggtcaccctgacgtgccgtagcagcaacggtgcggtcacgagcagcaactatgccaattgggtccagcagaaaccgggtcaagcaccgcgtggcctgatcggcggcaccaataaacgtgccccgggtactcctgcgcgtttctccggtagctcactgggcggctcagccgctctgaccctgagcggtgtccagccggaagatgaagcggtgtactactgcgcgctgtggtatccgaatctgtgggtttttggcggcggtaccaagctgaccgtattgggtgctacgccaccggagactggcgcagaaacggaaagcccgggtgagactacgggtggctctgcggagagcgaacctccgggtgagggtgaggtccaactgcaggagtctggtggtggcattgttcaaccgggtggctcgttgaagctgagctgtgcagctagcggctttaccttcaacacctatgcgatgaattgggttcgtcaggcaccgggtaagggcctggaatgggtggcgcgtatccgctccaagtacaacaactacgcgacctactacgcggatagcgttaaagaccgcttcacgattagccgtgacgattccaagaatacggtgtatctgcaaatgaacaatctgaaaaccgaagataccgcggtgtattactgtgtgcgccacgaaaatttcggcaacagctacgtgagctggtttgcacattggggtcagggcaccctggttacggtgagctccgggactgctgaggcggctagcgcctccggagaagctggaagaagcgccaatcacacaccagctggacttacaggcccgcctggtagccccgcggggagccctacaagcactgaggagggcacatctgagtccgctacccctgagagtggacccgggacaagcactgagcctagcgaaggaagcgcaccaggttcccccgctgggagccccacaagcacagaagagggaacttctaccgagccctctgagggctcagcccctggaactagcacagagccctccgaaggcagtgcaccgggtacttccgaaagcgcaactccggaatccggccctggttctgagcctgctacttccggctctgaaactccaggtagcgagccagcgacttctggttctgaaactccaggttcaccggcgggtagcccgacgagcacggaggaaggtacctctgagtcggccactcctgagtccggtccgggcacgagcaccgagccgagcgagggttcagccccgggtaccagcacggagccgtccgagggtagcgcaccgggttctccggcgggctcccctacgtctacggaagagggtacgtccactgaacctagcgagggcagcgcgccaggcaccagcactgaaccgagcgaaggcagcgcacctggcactagcgagtctgcgactccggagagcggtccgggtacgagcacggaaccaagcgaaggcagcgccccaggtacctctgaatctgctaccccagaatctggcccgggttccgagccagctacctctggttctgaaaccccaggtacttccactgaaccaagcgaaggtagcgctcctggcacttctactgaaccatccgaaggttccgctcctggtacgtctgaaagcgctacccctgaaagcggcccaggcacctctgaaagcgctactcctgagagcggtccaggctctccagcaggttctccaacctccactgaagaaggcacctctgagtctgctacccctgaatctggtcctggctccgaacctgctacctctggttccgaaactccaggtacctcggaatctgcgactccggaatctggcccgggcacgagcacggagccgtctgagggtagcgcaccaggtaccagcactgagccttctgagggctctgcaccgggtacctccacggaaccttcggaaggttctgcgccgggtacctccactgagccatccgagggttcagcaccaggtactagcacggaaccgtccgagggctctgcaccaggtacgagcaccgaaccgtcggagggtagcgctccaggtagcccagcgggctctccgacaagcaccgaagaaggcaccagcaccgagccgtccgaaggttccgcaccaggtacaagcgagagcgcgactcctgaatctggtccgggtagcgagcctgcaaccagcggttctgagacgccgggcacttccgaatctgcgaccccggagtccggtccaggttcagagccggcgacgagcggttcggaaacgccgggtacgtctgaatcagccacgccggagtctggtccgggtacctcgaccgaaccaagcgaaggttcggcaccgggtactagcgagagcgcaacccctgaaagcggtccgggcagcccggcaggttctccaaccagcaccgaagaaggttcccctgctggtagcccgacctctacggaggaaggtagccctgcaggttccccaacttctactgaggaaggtacttctgagtccgctaccccagaaagcggtcctggtacctccactgaaccgtctgaaggctctgcaccaggcacttctgagtctgctactccagaaagcggcccaggttctgaaccagcaacttctggctctgagactccaggcacttctgagtccgcaacgcctgaatccggtcctggttctgaaccagctacttccggcagcgaaaccccaggtacctctgagtctgcgactccagagtctggtcctggtacttccactgagcctagcgagggttccgcaccaggttctccggctggtagcccgaccagcacggaggagggtacgtctgaatctgcaacgccggaatcgggcccaggttcggagcctgcaacgtctggcagcgaaaccccgggtacctccgaatctgctacaccggaaagcggtcctggcagccctgctggttctccaacctctaccgaggagggttcaccggcaggtagcccgactagcactgaagaaggtactagcacggagccgagcgagggtagtgctccgggtacgagcgagagcgcaacgccagagagcggtccaggcaccagcgaatcggccacccctgagagcggcccaggtacttctgagagcgccactcctgaatccggccctggtagcgagccggcaacctccggctcagaaactcctggttcggaaccagcgaccagcggttctgaaactccgggtagcccggcaggcagcccaacgagcaccgaagagggtaccagcacggaaccgagcgagggttctgccccgggtacttccaccgaaccatcggagggctctgcacctggtagcgaacctgcgacgtctggttctgaaacgccgggtaccagcgaaagcgctaccccagaatccggtccgggcactagcaccgagccatcggagggcgccgcagaaccagaggcg

SEQ ID NO: 942 - DNA, 4377 bp, Artificial Sequence
  Description of Artificial Sequence: Synthetic polynucleotide
caccatcatcaccatcactccccagcaggcagcccgaccagcaccgaggagggtacgagcgagtcggctactccagagagcggtccgggtacctctacggaaccgtccgaaggtagcgctccaggcacgtctgaaagcgcgacgccggaaagcggtccaggcagcgagccggcgacctccggtagcgaaacgcctggtacctcggagtcagcgactccggaaagcggtccgggtagcgaacctgcaacgagcggtagcgagactccaggcactagcgaatccgcaactccggagtcgggtccgggcacctctacggagcctagcgagggctcagcaccaggtagccctgcaggttccccgacgtcaaccgaggaaggtacaagcgaaagcgccacccctgagtcgggccctggcagcgaaccggcaactagcggcagcgagactccgggtaccagcgagtctgctacgccagagagcggcccaggttcgccagcgggttcgccgactagcacggaggagggcagcccagcgggtagcccgaccagcactgaggagggtacgtccaccgaaccgagcgaaggtagcgcaccaggtacctccgagtctgccacccctgaatccggtccaggtaccagcgaatcagccaccccggagtcgggtccaggtacgagcgaatctgctaccccggaatccggcccaggcagcgaacctgctactagcggcagcgaaacgccgggcagcgaacctgccacgtcaggcagcgagacgccgggttcccctgcaggctccccgaccagcactgaggagggcacctccaccgaaccatcagaaggtagcgcgcctggtacgtcaaccgaaccttccgagggcagcgcaccgggtggctcagcgcctgaggcaggtcgttctgctaaccatacccctgcaggattaactggccccgccaccagcgggagcgagacccccgggactgacattcagatgactcagtctccgtcctccctgtctgcgagcgtgggcgaccgtgtgactattacctgtaaagcctcccaggacgtgtctatcggtgtggcatggtatcaacaaaagccgggtaaggcacctaaactgctgatctactccgcttcttaccgttacacgggcgttccgtcccgttttagcggttccggtagcggtactgattttaccctgactatttcctccctgcaaccagaagactttgcgacctattactgtcagcaatactatatttacccgtataccttcggccagggcactaaggttgaaattaaaggtgcaacgcctccggagactggtgctgaaactgagtccccgggcgagacgaccggtggctctgctgaatccgaaccaccgggcgaaggcgaggttcagctggtggagtctggcggcggtctggtacagccgggtggtagcctgcgtctgagctgcgcggcgtccggtttcactttcaccgattataccatggactgggttcgccaggcaccgggcaagggtctggaatgggtggcggacgtgaacccgaactccggtggttctatctacaaccagcgtttcaaaggtcgtttcacgctgagcgtagatcgtagcaaaaacactctgtacctgcagatgaactccctgcgcgcagaagacaccgcggtgtattactgtgcacgtaacctgggcccgtccttctatttcgactactggggtcaaggtactctggtaactgtttcctctggtggtggcggcagcgagttagttgtgacccaagagccgagcctgaccgttagcccgggtggtacggtcaccctgacgtgccgtagcagcaacggtgcggtcacgagcagcaactatgccaattgggtccagcagaaaccgggtcaagcaccgcgtggcctgatcggcggcaccaataaacgtgccccgggtactcctgcgcgtttctccggtagcctgctgggcggcaaagccgctctgaccctgagcggtgtccagccggaagatgaagcggtgtactactgcgcgctgtggtatccgaatctgtgggtttttggcggcggtaccaagctgaccgtattgggtgctacgccaccggagactggcgcagaaacggaaagcccgggtgagactacgggtggctctgcggagagcgaacctccgggtgagggtgaggtccaactgctggagtctggtggtggcattgttcaaccgggtggctcgttgaagctgagctgtgcagctagcggctttaccttcaacacctatgcgatgaattgggttcgtcaggcaccgggtaagggcctggaatgggtggcgcgtatccgctccaagtacaacaactacgcgacctactacgcggatagcgttaaagaccgcttcacgattagccgtgacgattccaagaatacggtgtatctgcaaatgaacaatctgaaaaccgaagataccgcggtgtattactgtgtgcgccacgaaaatttcggcaacagctacgtgagctggtttgcacattggggtcagggcaccctggttacggtgagctccgggactgctgaggcggctagcgcctccggagaagctggaagaagcgccaatcacacaccagctggacttacaggcccgcctggtagccccgcggggagccctacaagcactgaggagggcacatctgagtccgctacccctgagagtggacccgggacaagcactgagcctagcgaaggaagcgcaccaggttcccccgctgggagccccacaagcacagaagagggaacttctaccgagccctctgagggctcagcccctggaactagcacagagccctccgaaggcagtgcaccgggtacttccgaaagcgcaactccggaatccggccctggttctgagcctgctacttccggctctgaaactccaggtagcgagccagcgacttctggttctgaaactccaggttcaccggcgggtagcccgacgagcacggaggaaggtacctctgagtcggccactcctgagtccggtccgggcacgagcaccgagccgagcgagggttcagccccgggtaccagcacggagccgtccgagggtagcgcaccgggttctccggcgggctcccctacgtctacggaagagggtacgtccactgaacctagcgagggcagcgcgccaggcaccagcactgaaccgagcgaaggcagcgcacctggcactagcgagtctgcgactccggagagcggtccgggtacgagcacggaaccaagcgaaggcagcgccccaggtacctctgaatctgctaccccagaatctggcccgggttccgagccagctacctctggttctgaaaccccaggtacttccactgaaccaagcgaaggtagcgctcctggcacttctactgaaccatccgaaggttccgctcctggtacgtctgaaagcgctacccctgaaagcggcccaggcacctctgaaagcgctactcctgagagcggtccaggctctccagcaggttctccaacctccactgaagaaggcacctctgagtctgctacccctgaatctggtcctggctccgaacctgctacctctggttccgaaactccaggtacctcggaatctgcgactccggaatctggcccgggcacgagcacggagccgtctgagggtagcgcaccaggtaccagcactgagccttctgagggctctgcaccgggtacctccacggaaccttcggaaggttctgcgccgggtacctccactgagccatccgagggttcagcaccaggtactagcacggaaccgtccgagggctctgcaccaggtacgagcaccgaaccgtcggagggtagcgctccaggtagcccagcgggctctccgacaagcaccgaagaaggcaccagcaccgagccgtccgaaggttccgcaccaggtacaagcgagagcgcgactcctgaatctggtccgggtagcgagcctgcaaccagcggttctgagacgccgggcacttccgaatctgcgaccccggagtccggtccaggttcagagccggcgacgagcggttcggaaacgccgggtacgtctgaatcagccacgccggagtctggtccgggtacctcgaccgaaccaagcgaaggttcggcaccgggtactagcgagagcgcaacccctgaaagcggtccgggcagcccggcaggttctccaaccagcaccgaagaaggttcccctgctggtagcccgacctctacggaggaaggtagccctgcaggttccccaacttctactgaggaaggtacttctgagtccgctaccccagaaagcggtcctggtacctccactgaaccgtctgaaggctctgcaccaggcgccgcagaaccagaggcg

SEQ ID NO: 943 - DNA, 3525 bp, Artificial Sequence
  Description of Artificial Sequence: Synthetic polynucleotide
caccatcatcaccatcactccccagcaggcagcccgaccagcaccgaggagggtacgagcgagtcggctactccagagagcggtccgggtacctctacggaaccgtccgaaggtagcgctccaggcacgtctgaaagcgcgacgccggaaagcggtccaggcagcgagccggcgacctccggtagcgaaacgcctggtacctcggagtcagcgactccggaaagcggtccgggtagcgaacctgcaacgagcggtagcgagactccaggcactagcgaatccgcaactccggagtcgggtccgggcacctctacggagcctagcgagggctcagcaccaggtagccctgcaggttccccgacgtcaaccgaggaaggtacaagcgaaagcgccacccctgagtcgggccctggcagcgaaccggcaactagcggcagcgagactccgggtaccagcgagtctgctacgccagagagcggcccaggttcgccagcgggttcgccgactagcacggaggagggcagcccagcgggtagcccgaccagcactgaggagggtacgtccaccgaaccgagcgaaggtagcgcaccaggtacctccgagtctgccacccctgaatccggtccaggtaccagcgaatcagccaccccggagtcgggtccaggtacgagcgaatctgctaccccggaatccggcccaggcagcgaacctgctactagcggcagcgaaacgccgggcagcgaacctgccacgtcaggcagcgagacgccgggttcccctgcaggctccccgaccagcactgaggagggcacctccaccgaaccatcagaaggtagcgcgcctggtacgtcaaccgaaccttccgagggcagcgcaccgggtggctcagcgcctgaggcaggtcgttctgctaaccatacccctgcaggattaactggccccgccaccagcgggagcgagacccccgggactgacattcagatgactcagtctccgtcctccctgtctgcgagcgtgggcgaccgtgtgactattacctgtaaagcctcccaggacgtgtctatcggtgtggcatggtatcaacaaaagccgggtaaggcacctaaactgctgatctactccgcttcttaccgttacacgggcgttccgtcccgttttagcggttccggtagcggtactgattttaccctgactatttcctccctgcaaccagaagactttgcgacctattactgtcagcaatactatatttacccgtataccttcggccagggcactaaggttgaaattaaaggtgcaacgcctccggagactggtgctgaaactgagtccccgggcgagacgaccggtggctctgctgaatccgaaccaccgggcgaaggcgaggttcagctggtggagtctggcggcggtctggtacagccgggtggtagcctgcgtctgagctgcgcggcgtccggtttcactttcaccgattataccatggactgggttcgccaggcaccgggcaagggtctggaatgggtggcggacgtgaacccgaactccggtggttctatctacaaccagcgtttcaaaggtcgtttcacgctgagcgtagatcgtagcaaaaacactctgtacctgcagatgaactccctgcgcgcagaagacaccgcggtgtattactgtgcacgtaacctgggcccgtccttctatttcgactactggggtcaaggtactctggtaactgtttcctctggtggtggcggcagcgagttagttgtgacccaagagccgagcctgaccgttagcccgggtggtacggtcaccctgacgtgccgtagcagcaacggtgcggtcacgagcagcaactatgccaattgggtccagcagaaaccgggtcaagcaccgcgtggcctgatcggcggcaccaataaacgtgccccgggtactcctgcgcgtttctccggtagcctgctgggcggcaaagccgctctgaccctgagcggtgtccagccggaagatgaagcggtgtactactgcgcgctgtggtatccgaatctgtgggtttttggcggcggtaccaagctgaccgtattgggtgctacgccaccggagactggcgcagaaacggaaagcccgggtgagactacgggtggctctgcggagagcgaacctccgggtgagggtgaggtccaactgctggagtctggtggtggcattgttcaaccgggtggctcgttgaagctgagctgtgcagctagcggctttaccttcaacacctatgcgatgaattgggttcgtcaggcaccgggtaagggcctggaatgggtggcgcgtatccgctccaagtacaacaactacgcgacctactacgcggatagcgttaaagaccgcttcacgattagccgtgacgattccaagaatacggtgtatctgcaaatgaacaatctgaaaaccgaagataccgcggtgtattactgtgtgcgccacgaaaatttcggcaacagctacgtgagctggtttgcacattggggtcagggcaccctggttacggtgagctccgggactgctgaggcggctagcgcctccggagaagctggaagaagcgccaatcacacaccagctggacttacaggcccgcctggtagccccgcggggagccctacaagcactgaggagggcacatctgagtccgctacccctgagagtggacccgggacaagcactgagcctagcgaaggaagcgcaccaggttcccccgctgggagccccacaagcacagaagagggaacttctaccgagccctctgagggctcagcccctggaactagcacagagccctccgaaggcagtgcaccgggtacttccgaaagcgcaactccggaatccggccctggttctgagcctgctacttccggctctgaaactccaggtagcgagccagcgacttctggttctgaaactccaggttcaccggcgggtagcccgacgagcacggaggaaggtacctctgagtcggccactcctgagtccggtccgggcacgagcaccgagccgagcgagggttcagccccgggtaccagcacggagccgtccgagggtagcgcaccgggttctccggcgggctcccctacgtctacggaagagggtacgtccactgaacctagcgagggcagcgcgccaggcaccagcactgaaccgagcgaaggcagcgcacctggcactagcgagtctgcgactccggagagcggtccgggtacgagcacggaaccaagcgaaggcagcgccccaggtacctctgaatctgctaccccagaatctggcccgggttccgagccagctacctctggttctgaaaccccaggtacttccactgaaccaagcgaaggtagcgctcctggcacttctactgaaccatccgaaggttccgctcctggtacgtctgaaagcgctacccctgaaagcggcccaggcacctctgaaagcgctactcctgagagcggtccaggctctccagcaggcgccgcagaaccagaggcg

SEQ ID NO: 944 - DNA, 3060 bp, Artificial Sequence
  Description of Artificial Sequence: Synthetic polynucleotide
caccatcatcaccatcacggttctccggcgggtagcccaactagcaccgaggaaggtactagcgagagcgcaacgccggagtccggtccgggtacgtctacagaacctagcgagggttctgctccgggctctccagcaggctccccgacgagcaccgaggaaggcacttcgaccgagcctagcgagggtagcgcgcctggcaccagcaccgaaccgagcgagggtagcgctccgggcacctctgaaagcgcaaccccagaatccggcccaggctctgagccggcgactagcggttccgagactccgggctcggaaccggcgacgtccggcagcgaaacgccaggttcccctgccggttcgcctaccagcacggaagagggcacttcagagagtgcgacgccagagtcgggtcctggtaccagtaccgagccgagcgagggctcagcgcctgaggcaggtcgttctgctaaccatacccctgcaggattaactggccccgccaccagcgggagcgagacccccgggactgacattcagatgactcagtctccgtcctccctgtctgcgagcgtgggcgaccgtgtgactattacctgtaaagcctcccaggacgtgtctatcggtgtggcatggtatcaacaaaagccgggtaaggcacctaaactgctgatctactccgcttcttaccgttacacgggcgttccgtcccgttttagcggttccggtagcggtactgattttaccctgactatttcctccctgcaaccagaagactttgcgacctattactgtcagcaatactatatttacccgtataccttcggccagggcactaaggttgaaattaaaggtgcaacgcctccggagactggtgctgaaactgagtccccgggcgagacgaccggtggctctgctgaatccgaaccaccgggcgaaggcgaggttcagctggtggagtctggcggcggtctggtacagccgggtggtagcctgcgtctgagctgcgcggcgtccggtttcactttcaccgattataccatggactgggttcgccaggcaccgggcaagggtctggaatgggtggcggacgtgaacccgaactccggtggttctatctacaaccagcgtttcaaaggtcgtttcacgctgagcgtagatcgtagcaaaaacactctgtacctgcagatgaactccctgcgcgcagaagacaccgcggtgtattactgtgcacgtaacctgggcccgtccttctatttcgactactggggtcaaggtactctggtaactgtttcctctggtggtggcggcagcgagttagttgtgacccaagagccgagcctgaccgttagcccgggtggtacggtcaccctgacgtgccgtagcagcaacggtgcggtcacgagcagcaactatgccaattgggtccagcagaaaccgggtcaagcaccgcgtggcctgatcggcggcaccaataaacgtgccccgggtactcctgcgcgtttctccggtagcctgctgggcggcaaagccgctctgaccctgagcggtgtccagccggaagatgaagcggtgtactactgcgcgctgtggtatccgaatctgtgggtttttggcggcggtaccaagctgaccgtattgggtgctacgccaccggagactggcgcagaaacggaaagcccgggtgagactacgggtggctctgcggagagcgaacctccgggtgagggtgaggtccaactgctggagtctggtggtggcattgttcaaccgggtggctcgttgaagctgagctgtgcagctagcggctttaccttcaacacctatgcgatgaattgggttcgtcaggcaccgggtaagggcctggaatgggtggcgcgtatccgctccaagtacaacaactacgcgacctactacgcggatagcgttaaagaccgcttcacgattagccgtgacgattccaagaatacggtgtatctgcaaatgaacaatctgaaaaccgaagataccgcggtgtattactgtgtgcgccacgaaaatttcggcaacagctacgtgagctggtttgcacattggggtcagggcaccctggttacggtgagctccgggactgctgaggcggctagcgcctccggagaagctggaagaagcgccaatcacacaccagctggacttacaggcccgcctggtagccccgcggggagccctacaagcactgaggagggcacatctgagtccgctacccctgagagtggacccgggacaagcactgagcctagcgaaggaagcgcaccaggttcccccgctgggagccccacaagcacagaagagggaacttctaccgagccctctgagggctcagcccctggaactagcacagagccctccgaaggcagtgcaccgggtacttccgaaagcgcaactccggaatccggccctggttctgagcctgctacttccggctctgaaactccaggtagcgagccagcgacttctggttctgaaactccaggttcaccggcgggtagcccgacgagcacggaggaaggtacctctgagtcggccactcctgagtccggtccgggcacgagcaccgagccgagcgagggttcagccccgggtaccagcacggagccgtccgagggtagcgcaccgggttctccggcgggctcccctacgtctacggaagagggtacgtccactgaacctagcgagggcagcgcgccaggcaccagcactgaaccgagcgaaggcagcgcacctggcactagcgagtctgcgactccggagagcggtccgggtacgagcacggaaccaagcgaaggcagcgccccaggtacctctgaatctgctaccccagaatctggcccgggttccgagccagctacctctggttctgaaaccccaggtacttccactgaaccaagcgaaggtagcgctcctggcacttctactgaaccatccgaaggttccgctcctggtacgtctgaaagcgctacccctgaaagcggcccaggcacctctgaaagcgctactcctgagggcgccgcagaaccagaggcg

SEQ ID NO: 945 - DNA, 5229 bp, Artificial Sequence
  Description of Artificial Sequence: Synthetic polynucleotide
caccatcatcaccatcactccccagcaggcagcccgaccagcaccgaggagggtacgagcgagtcggctactccagagagcggtccgggtacctctacggaaccgtccgaaggtagcgctccaggcacgtctgaaagcgcgacgccggaaagcggtccaggcagcgagccggcgacctccggtagcgaaacgcctggtacctcggagtcagcgactccggaaagcggtccgggtagcgaacctgcaacgagcggtagcgagactccaggcactagcgaatccgcaactccggagtcgggtccgggcacctctacggagcctagcgagggctcagcaccaggtagccctgcaggttccccgacgtcaaccgaggaaggtacaagcgaaagcgccacccctgagtcgggccctggcagcgaaccggcaactagcggcagcgagactccgggtaccagcgagtctgctacgccagagagcggcccaggttcgccagcgggttcgccgactagcacggaggagggcagcccagcgggtagcccgaccagcactgaggagggtacgtccaccgaaccgagcgaaggtagcgcaccaggtacctccgagtctgccacccctgaatccggtccaggtaccagcgaatcagccaccccggagtcgggtccaggtacgagcgaatctgctaccccggaatccggcccaggcagcgaacctgctactagcggcagcgaaacgccgggcagcgaacctgccacgtcaggcagcgagacgccgggttcccctgcaggctccccgaccagcactgaggagggcacctccaccgaaccatcagaaggtagcgcgcctggtacgtcaaccgaaccttccgagggcagcgcaccgggtggctcagcgcctgaggcaggtcgttctgctaaccataccccagcggggctgactgggcctgctacctcaggctccgaaaccccgggcaccgacatccaaatgacccagagcccgagcagcctgagcgcgagcgtgggcgaccgtgttaccatcacctgccaagcgagccaagacatcagcaactacctgaactggtatcagcaaaagccgggcaaagcgccgaagctgctgatctacgacgcgagcaacctggaaaccggtgtgccgagccgtttcagcggtagcggtagcggtaccgatttcacctttaccatcagcagcctgcaaccggaggacatcgcgacctatttctgccagcactttgatcacctgccgctggcgtttggtggcggtaccaaagttgagattaaaggtgcaacgcctccggagactggtgctgaaactgagtccccgggcgagacgaccggtggctctgctgaatccgaaccaccgggcgaaggccaggtgcaactgcaggaaagcggtccgggcctggttaaaccgagcgaaaccctgagcctgacctgcaccgtgagcggcggtagcgttagcagcggtgactactattggacctggatccgtcaaagcccgggtaaaggcctggagtggatcggtcacatttactatagcggcaacaccaactacaacccgagcctgaagagccgtctgaccatcagcattgacaccagcaaaacccagttcagcctgaaactgagcagcgtgaccgcggcggataccgcgatttactattgcgttcgtgatcgtgttaccggcgcgttcgacatctggggtcagggcaccatggttaccgttagcagcggtggtggcggcagcgagttagttgtgacccaagagccgagcctgaccgttagcccgggtggtacggtcaccctgacgtgccgtagcagcaccggtgcggtcacgaccagcaactatgccaattgggtccagcagaaaccgggtcaagcaccgcgtggcctgatcggcggcaccaataaacgtgccccgggtactcctgcgcgtttctccggtagcctgctgggcggcaaagccgctctgaccctgagcggtgtccagccggaagatgaagcggagtactactgcgcgctgtggtattccaatctgtgggtttttggcggcggtaccaagctgaccgtattgggtgctacgccaccggagactggcgcagaaacggaaagcccgggtgagactacgggtggctctgcggagagcgaacctccgggtgagggtgaggtccaactgctggagtctggtggtggcctggttcaaccgggtggctcgttgaagctgagctgtgcagctagcggctttaccttcaacacctatgcgatgaattgggttcgtcaggcaccgggtaagggcctggaatgggtggcgcgtatccgctccaagtacaacaactacgcgacctactacgcggatagcgttaaagaccgcttcacgattagccgtgacgattccaagaatacggcatatctgcaaatgaacaatctgaaaaccgaagataccgcggtgtattactgtgtgcgccacggcaatttcggcaacagctacgtgagctggtttgcatattggggtcagggcaccctggttacggtgagctccggcaccgccgaagcagctagcgcctctggcgaggcaggtcgttctgctaaccataccccagcggggctgactgggcctccaggtagcccagctggtagcccaacctctaccgaagaaggtacctctgaatccgctactccagaatccggtcctggtactagcactgagccaagcgaaggttctgctccaggctccccggcaggtagccctacctctaccgaagagggcactagcaccgaaccatctgagggttccgctcctggcacctccactgaaccgtccgaaggcagtgctccgggtacttccgaaagcgcaactccggaatccggccctggttctgagcctgctacttccggctctgaaactccaggtagcgagccagcgacttctggttctgaaactccaggttcaccggcgggtagcccgacgagcacggaggaaggtacctctgagtcggccactcctgagtccggtccgggcacgagcaccgagccgagcgagggttcagccccgggtaccagcacggagccgtccgagggtagcgcaccgggttctccggcgggctcccctacgtctacggaagagggtacgtccactgaacctagcgagggcagcgcgccaggcaccagcactgaaccgagcgaaggcagcgcacctggcactagcgagtctgcgactccggagagcggtccgggtacgagcacggaaccaagcgaaggcagcgccccaggtacctctgaatctgctaccccagaatctggcccgggttccgagccagctacctctggttctgaaaccccaggtacttccactgaaccaagcgaaggtagcgctcctggcacttctactgaaccatccgaaggttccgctcctggtacgtctgaaagcgctacccctgaaagcggcccaggcacctctgaaagcgctactcctgagagcggtccaggctctccagcaggttctccaacctccactgaagaaggcacctctgagtctgctacccctgaatctggtcctggctccgaacctgctacctctggttccgaaactccaggtacctcggaatctgcgactccggaatctggcccgggcacgagcacggagccgtctgagggtagcgcaccaggtaccagcactgagccttctgagggctctgcaccgggtacctccacggaaccttcggaaggttctgcgccgggtacctccactgagccatccgagggttcagcaccaggtactagcacggaaccgtccgagggctctgcaccaggtacgagcaccgaaccgtcggagggtagcgctccaggtagcccagcgggctctccgacaagcaccgaagaaggcaccagcaccgagccgtccgaaggttccgcaccaggtacaagcgagagcgcgactcctgaatctggtccgggtagcgagcctgcaaccagcggttctgagacgccgggcacttccgaatctgcgaccccggagtccggtccaggttcagagccggcgacgagcggttcggaaacgccgggtacgtctgaatcagccacgccggagtctggtccgggtacctcgaccgaaccaagcgaaggttcggcaccgggtactagcgagagcgcaacccctgaaagcggtccgggcagcccggcaggttctccaaccagcaccgaagaaggttcccctgctggtagcccgacctctacggaggaaggtagccctgcaggttccccaacttctactgaggaaggtacttctgagtccgctaccccagaaagcggtcctggtacctccactgaaccgtctgaaggctctgcaccaggcacttctgagtctgctactccagaaagcggcccaggttctgaaccagcaacttctggctctgagactccaggcacttctgagtccgcaacgcctgaatccggtcctggttctgaaccagctacttccggcagcgaaaccccaggtacctctgagtctgcgactccagagtctggtcctggtacttccactgagcctagcgagggttccgcaccaggttctccggctggtagcccgaccagcacggaggagggtacgtctgaatctgcaacgccggaatcgggcccaggttcggagcctgcaacgtctggcagcgaaaccccgggtacctccgaatctgctacaccggaaagcggtcctggcagccctgctggttctccaacctctaccgaggagggttcaccggcaggtagcccgactagcactgaagaaggtactagcacggagccgagcgagggtagtgctccgggtacgagcgagagcgcaacgccagagagcggtccaggcaccagcgaatcggccacccctgagagcggcccaggtacttctgagagcgccactcctgaatccggccctggtagcgagccggcaacctccggctcagaaactcctggttcggaaccagcgaccagcggttctgaaactccgggtagcccggcaggcagcccaacgagcaccgaagagggtaccagcacggaaccgagcgagggttctgccccgggtacttccaccgaaccatcggagggctctgcacctggtagcgaacctgcgacgtctggttctgaaacgccgggtaccagcgaaagcgctaccccagaatccggtccgggcactagcaccgagccatcggagggcgccgcagaaccagaggcg

SEQ ID NO: 946 - DNA, 5229 bp, Artificial Sequence
  Description of Artificial Sequence: Synthetic polynucleotide
caccatcatcaccatcactccccagcaggcagcccgaccagcaccgaggagggtacgagcgagtcggctactccagagagcggtccgggtacctctacggaaccgtccgaaggtagcgctccaggcacgtctgaaagcgcgacgccggaaagcggtccaggcagcgagccggcgacctccggtagcgaaacgcctggtacctcggagtcagcgactccggaaagcggtccgggtagcgaacctgcaacgagcggtagcgagactccaggcactagcgaatccgcaactccggagtcgggtccgggcacctctacggagcctagcgagggctcagcaccaggtagccctgcaggttccccgacgtcaaccgaggaaggtacaagcgaaagcgccacccctgagtcgggccctggcagcgaaccggcaactagcggcagcgagactccgggtaccagcgagtctgctacgccagagagcggcccaggttcgccagcgggttcgccgactagcacggaggagggcagcccagcgggtagcccgaccagcactgaggagggtacgtccaccgaaccgagcgaaggtagcgcaccaggtacctccgagtctgccacccctgaatccggtccaggtaccagcgaatcagccaccccggagtcgggtccaggtacgagcgaatctgctaccccggaatccggcccaggcagcgaacctgctactagcggcagcgaaacgccgggcagcgaacctgccacgtcaggcagcgagacgccgggttcccctgcaggctccccgaccagcactgaggagggcacctccaccgaaccatcagaaggtagcgcgcctggtacgtcaaccgaaccttccgagggcagcgcaccgggtggctcagcgcctgaggcaggtcgttctgctaaccatacccctgcaggattaactggccccgccaccagcgggagcgagacccccgggactgatatccagatgacccaaagccctagttcattaagcgcatcggtgggtgaccgggtaaccattacctgtcaagcaagtcaggatatcagcaactacctgaactggtaccagcagaaacccggaaaagcgccgaaactgctgatctatgatgccagcaatctggaaacaggtgttcctagccgtttctctggatcaggttcaggaaccgattttacattcaccattagctcattacagccggaggataccgcgacgtatttttgccagcacttcgatcatctgcctttagcatttggcggcggtactaaagtggagatcaaaggagcgacgccgcctgagactggagcagagaccgaatcacctggtgagacgacgggcgggtcagccgaaagcgagccaccgggggaagggcaggttcaattgcaagaaagtggaccgggcgccgtcaaacccagcgaaaccctctccctgacctgcacagtcagcggagggtctgtgagctcaggcgactactattggacctggattagacaatcaccaggtaaaggtcttgagtggattggccacatctactatagcggtaacaccaactataatccgagcctgaaaagtcgtctgaccatcagcatcgacaccagcaaaacccagtttagcctgaaattaagcagcgttacagcagcggatacagcgacctactattgtgtccgtgatcgcgttactggcgcatttgatatttgggggcagggaacagcagttactgtgtcaagtggaggaggtggcagtgaactggttgttacacaagaaccgtccttaacagttagtccggggggcaccgtcacattaacatgtcgttcaagtacaggtgcagtaaccacgtccaactatgcaaattgggttcaacagaagcccggacaggccccgagaggtttaataggtggaacaaacaaaagagcacctggtacacctgcccggttctccggatcctctctcggcggttccgcagcattaaccttaagtggtgttcagccggaagatgaagcggagtattactgcgcactttggtatagcaacttatgggtgtttggaggcggtacaaaattgaccgttctgggtgcgacgccgcccgaaacgggcgcggagacggagtccccaggtgaaaccactggtggaagcgcagaatcagagccaccgggcgagggggaagtacaattacaggagtccggcggaggtctggttcagcctggtggtagcctcaaactgtcctgcgcagcaagcggttttacctttaacacctacgccatgaactgggtgcgtcaagctcctggtaaaggcttagaatgggttgcgcgtattcgtagcaaatacaacaactatgccacctattacgcggacagtgtaaaagaccgtttcaccatcagccgcgatgatagcaaaaatacagcctatctgcagatgaacaacctgaagaccgaagacacggccgtctactactgcgtgcgtcatggcaattttggcaacagctatgttagctggttcgcgtattggggccagggaacactggtcacggtttcctcagggactgctgaggcggctagcgcctccggagaagctggaagaagcgccaatcacacaccagctggacttacaggcccgcctggtagccccgcggggagccctacaagcactgaggagggcacatctgagtccgctacccctgagagtggacccgggacaagcactgagcctagcgaaggaagcgcaccaggttcccccgctgggagccccacaagcacagaagagggaacttctaccgagccctctgagggctcagcccctggaactagcacagagccctccgaaggcagtgcaccgggtacttccgaaagcgcaactccggaatccggccctggttctgagcctgctacttccggctctgaaactccaggtagcgagccagcgacttctggttctgaaactccaggttcaccggcgggtagcccgacgagcacggaggaaggtacctctgagtcggccactcctgagtccggtccgggcacgagcaccgagccgagcgagggttcagccccgggtaccagcacggagccgtccgagggtagcgcaccgggttctccggcgggctcccctacgtctacggaagagggtacgtccactgaacctagcgagggcagcgcgccaggcaccagcactgaaccgagcgaaggcagcgcacctggcactagcgagtctgcgactccggagagcggtccgggtacgagcacggaaccaagcgaaggcagcgccccaggtacctctgaatctgctaccccagaatctggcccgggttccgagccagctacctctggttctgaaaccccaggtacttccactgaaccaagcgaaggtagcgctcctggcacttctactgaaccatccgaaggttccgctcctggtacgtctgaaagcgctacccctgaaagcggcccaggcacctctgaaagcgctactcctgagagcggtccaggctctccagcaggttctccaacctccactgaagaaggcacctctgagtctgctacccctgaatctggtcctggctccgaacctgctacctctggttccgaaactccaggtacctcggaatctgcgactccggaatctggcccgggcacgagcacggagccgtctgagggtagcgcaccaggtaccagcactgagccttctgagggctctgcaccgggtacctccacggaaccttcggaaggttctgcgccgggtacctccactgagccatccgagggttcagcaccaggtactagcacggaaccgtccgagggctctgcaccaggtacgagcaccgaaccgtcggagggtagcgctccaggtagcccagcgggctctccgacaagcaccgaagaaggcaccagcaccgagccgtccgaaggttccgcaccaggtacaagcgagagcgcgactcctgaatctggtccgggtagcgagcctgcaaccagcggttctgagacgccgggcacttccgaatctgcgaccccggagtccggtccaggttcagagccggcgacgagcggttcggaaacgccgggtacgtctgaatcagccacgccggagtctggtccgggtacctcgaccgaaccaagcgaaggttcggcaccgggtactagcgagagcgcaacccctgaaagcggtccgggcagcccggcaggttctccaaccagcaccgaagaaggttcccctgctggtagcccgacctctacggaggaaggtagccctgcaggttccccaacttctactgaggaaggtacttctgagtccgctaccccagaaagcggtcctggtacctccactgaaccgtctgaaggctctgcaccaggcacttctgagtctgctactccagaaagcggcccaggttctgaaccagcaacttctggctctgagactccaggcacttctgagtccgcaacgcctgaatccggtcctggttctgaaccagctacttccggcagcgaaaccccaggtacctctgagtctgcgactccagagtctggtcctggtacttccactgagcctagcgagggttccgcaccaggttctccggctggtagcccgaccagcacggaggagggtacgtctgaatctgcaacgccggaatcgggcccaggttcggagcctgcaacgtctggcagcgaaaccccgggtacctccgaatctgctacaccggaaagcggtcctggcagccctgctggttctccaacctctaccgaggagggttcaccggcaggtagcccgactagcactgaagaaggtactagcacggagccgagcgagggtagtgctccgggtacgagcgagagcgcaacgccagagagcggtccaggcaccagcgaatcggccacccctgagagcggcccaggtacttctgagagcgccactcctgaatccggccctggtagcgagccggcaacctccggctcagaaactcctggttcggaaccagcgaccagcggttctgaaactccgggtagcccggcaggcagcccaacgagcaccgaagagggtaccagcacggaaccgagcgagggttctgccccgggtacttccaccgaaccatcggagggctctgcacctggtagcgaacctgcgacgtctggttctgaaacgccgggtaccagcgaaagcgctaccccagaatccggtccgggcactagcaccgagccatcggagggcgccgcagaaccagaggcg

SEQ ID NO: 947 - DNA, 5229 bp, Artificial Sequence
  Description of Artificial Sequence: Synthetic polynucleotide
caccatcatcaccatcactccccagcaggcagcccgaccagcaccgaggagggtacgagcgagtcggctactccagagagcggtccgggtacctctacggaaccgtccgaaggtagcgctccaggcacgtctgaaagcgcgacgccggaaagcggtccaggcagcgagccggcgacctccggtagcgaaacgcctggtacctcggagtcagcgactccggaaagcggtccgggtagcgaacctgcaacgagcggtagcgagactccaggcactagcgaatccgcaactccggagtcgggtccgggcacctctacggagcctagcgagggctcagcaccaggtagccctgcaggttccccgacgtcaaccgaggaaggtacaagcgaaagcgccacccctgagtcgggccctggcagcgaaccggcaactagcggcagcgagactccgggtaccagcgagtctgctacgccagagagcggcccaggttcgccagcgggttcgccgactagcacggaggagggcagcccagcgggtagcccgaccagcactgaggagggtacgtccaccgaaccgagcgaaggtagcgcaccaggtacctccgagtctgccacccctgaatccggtccaggtaccagcgaatcagccaccccggagtcgggtccaggtacgagcgaatctgctaccccggaatccggcccaggcagcgaacctgctactagcggcagcgaaacgccgggcagcgaacctgccacgtcaggcagcgagacgccgggttcccctgcaggctccccgaccagcactgaggagggcacctccaccgaaccatcagaaggtagcgcgcctggtacgtcaaccgaaccttccgagggcagcgcaccgggtggctcagcgcctgaggcaggtcgttctgctaaccatacccctgcaggattaactggccccgccaccagcgggagcgagacccccgggactgatatccagatgacccaaagccctagttcattaagcgcatcggtgggtgaccgggtaaccattacctgtcaagcaagtcaggatatcagcaactacctgaactggtaccagcagaaacccggaaaagcgccgaaactgctgatctatgatgccagcaatctggaaacaggtgttcctagccgtttctctggatcaggttcaggaaccgattttacattcaccattagctcattacagccggaggataccgcgacgtatttttgccagcacttcgatcatctgcctttagcatttggcggcggtactaaagtggagatcaaaggagcgacgccgcctgagactggagcagagaccgaatcacctggtgagacgacgggcgggtcagccgaaagcgagccaccgggggaagggcaggttcaattgcaagaaagtggaccgggcgccgtcaaacccagcgaaaccctctccctgacctgcacagtcagcggagggtctgtgagctcaggcgactactattggacctggattagacaatcaccaggtaaaggtcttgagtggattggccacatctactatagcggtaacaccaactataatccgagcctgaaaagtcgtctgaccatcagcatcgacaccagcaaaacccagtttagcctgaaattaagcagcgttacagcagcggatacagcgacctactattgtgtccgtgatcgcgttactggcgcatttgatatttgggggcagggaacaacagttactgtgtcaagtggaggaggtggcagtgaactggttgttacacaagaaccgtccttaacagttagtccggggggcaccgtcacattaacatgtcgttcaagtacaggtgcagtaaccacgtccaactatgcaaattgggttcaacagaagcccggacaggccccgagaggtttaataggtggaacaaacaaaagagcacctggtacacctgcccggttctccggatcctctctcggcggttccgcagcattaaccttaagtggtgttcagccggaagatgaagcggagtattactgcgcactttggtatagcaacttatgggtgtttggaggcggtacaaaattgaccgttctgggtgcgacgccgcccgaaacgggcgcggagacggagtccccaggtgaaaccactggtggaagcgcagaatcagagccaccgggcgagggggaagtacaattacaggagtccggcggaggtctggttcagcctggtggtagcctcaaactgtcctgcgcagcaagcggttttacctttaacacctacgccatgaactgggtgcgtcaagctcctggtaaaggcttagaatgggttgcgcgtattcgtagcaaatacaacaactatgccacctattacgcggacagtgtaaaagaccgtttcaccatcagccgcgatgatagcaaaaatacagcctatctgcagatgaacaacctgaagaccgaagacacggccgtctactactgcgtgcgtcatggcaattttggcaacagctatgttagctggttcgcgtattggggccagggaacactggtcacggtttcctcagggactgctgaggcggctagcgcctccggagaagctggaagaagcgccaatcacacaccagctggacttacaggcccgcctggtagccccgcggggagccctacaagcactgaggagggcacatctgagtccgctacccctgagagtggacccgggacaagcactgagcctagcgaaggaagcgcaccaggttcccccgctgggagccccacaagcacagaagagggaacttctaccgagccctctgagggctcagcccctggaactagcacagagccctccgaaggcagtgcaccgggtacttccgaaagcgcaactccggaatccggccctggttctgagcctgctacttccggctctgaaactccaggtagcgagccagcgacttctggttctgaaactccaggttcaccggcgggtagcccgacgagcacggaggaaggtacctctgagtcggccactcctgagtccggtccgggcacgagcaccgagccgagcgagggttcagccccgggtaccagcacggagccgtccgagggtagcgcaccgggttctccggcgggctcccctacgtctacggaagagggtacgtccactgaacctagcgagggcagcgcgccaggcaccagcactgaaccgagcgaaggcagcgcacctggcactagcgagtctgcgactccggagagcggtccgggtacgagcacggaaccaagcgaaggcagcgccccaggtacctctgaatctgctaccccagaatctggcccgggttccgagccagctacctctggttctgaaaccccaggtacttccactgaaccaagcgaaggtagcgctcctggcacttctactgaaccatccgaaggttccgctcctggtacgtctgaaagcgctacccctgaaagcggcccaggcacctctgaaagcgctactcctgagagcggtccaggctctccagcaggttctccaacctccactgaagaaggcacctctgagtctgctacccctgaatctggtcctggctccgaacctgctacctctggttccgaaactccaggtacctcggaatctgcgactccggaatctggcccgggcacgagcacggagccgtctgagggtagcgcaccaggtaccagcactgagccttctgagggctctgcaccgggtacctccacggaaccttcggaaggttctgcgccgggtacctccactgagccatccgagggttcagcaccaggtactagcacggaaccgtccgagggctctgcaccaggtacgagcaccgaaccgtcggagggtagcgctccaggtagcccagcgggctctccgacaagcaccgaagaaggcaccagcaccgagccgtccgaaggttccgcaccaggtacaagcgagagcgcgactcctgaatctggtccgggtagcgagcctgcaaccagcggttctgagacgccgggcacttccgaatctgcgaccccggagtccggtccaggttcagagccggcgacgagcggttcggaaacgccgggtacgtctgaatcagccacgccggagtctggtccgggtacctcgaccgaaccaagcgaaggttcggcaccgggtactagcgagagcgcaacccctgaaagcggtccgggcagcccggcaggttctccaaccagcaccgaagaaggttcccctgctggtagcccgacctctacggaggaaggtagccctgcaggttccccaacttctactgaggaaggtacttctgagtccgctaccccagaaagcggtcctggtacctccactgaaccgtctgaaggctctgcaccaggcacttctgagtctgctactccagaaagcggcccaggttctgaaccagcaacttctggctctgagactccaggcacttctgagtccgcaacgcctgaatccggtcctggttctgaaccagctacttccggcagcgaaaccccaggtacctctgagtctgcgactccagagtctggtcctggtacttccactgagcctagcgagggttccgcaccaggttctccggctggtagcccgaccagcacggaggagggtacgtctgaatctgcaacgccggaatcgggcccaggttcggagcctgcaacgtctggcagcgaaaccccgggtacctccgaatctgctacaccggaaagcggtcctggcagccctgctggttctccaacctctaccgaggagggttcaccggcaggtagcccgactagcactgaagaaggtactagcacggagccgagcgagggtagtgctccgggtacgagcgagagcgcaacgccagagagcggtccaggcaccagcgaatcggccacccctgagagcggcccaggtacttctgagagcgccactcctgaatccggccctggtagcgagccggcaacctccggctcagaaactcctggttcggaaccagcgaccagcggttctgaaactccgggtagcccggcaggcagcccaacgagcaccgaagagggtaccagcacggaaccgagcgagggttctgccccgggtacttccaccgaaccatcggagggctctgcacctggtagcgaacctgcgacgtctggttctgaaacgccgggtaccagcgaaagcgctaccccagaatccggtccgggcactagcaccgagccatcggagggcgccgcagaaccagaggcg

SEQ ID NO: 948 - DNA, 5229 bp, Artificial Sequence
  Description of Artificial Sequence: Synthetic polynucleotide
caccatcatcaccatcactccccagcaggcagcccgaccagcaccgaggagggtacgagcgagtcggctactccagagagcggtccgggtacctctacggaaccgtccgaaggtagcgctccaggcacgtctgaaagcgcgacgccggaaagcggtccaggcagcgagccggcgacctccggtagcgaaacgcctggtacctcggagtcagcgactccggaaagcggtccgggtagcgaacctgcaacgagcggtagcgagactccaggcactagcgaatccgcaactccggagtcgggtccgggcacctctacggagcctagcgagggctcagcaccaggtagccctgcaggttccccgacgtcaaccgaggaaggtacaagcgaaagcgccacccctgagtcgggccctggcagcgaaccggcaactagcggcagcgagactccgggtaccagcgagtctgctacgccagagagcggcccaggttcgccagcgggttcgccgactagcacggaggagggcagcccagcgggtagcccgaccagcactgaggagggtacgtccaccgaaccgagcgaaggtagcgcaccaggtacctccgagtctgccacccctgaatccggtccaggtaccagcgaatcagccaccccggagtcgggtccaggtacgagcgaatctgctaccccggaatccggcccaggcagcgaacctgctactagcggcagcgaaacgccgggcagcgaacctgccacgtcaggcagcgagacgccgggttcccctgcaggctccccgaccagcactgaggagggcacctccaccgaaccatcagaaggtagcgcgcctggtacgtcaaccgaaccttccgagggcagcgcaccgggtggctcagcgcctgaggcaggtcgttctgctaaccatacccctgcaggattaactggccccgccaccagcgggagcgagacccccgggactgatatccagatgacccaaagccctagttcattaagcgcatcggtgggtgaccgggtaaccattacctgtcaagcaagtcaggatatcagcaactacctgaactggtaccagcagaaacccggaaaagcgccgaaactgctgatctatgatgccagcaatctggaaacaggtgttcctagccgtttctctggatcaggttcaggaaccgattttacattcaccattagctcattacagccggaggataccgcgacgtatttttgccagcacttcgatcatctgcctttagcatttggcggcggtactaaagtggagatcaaaggagcgacgccgcctgagactggagcagagaccgaatcacctggtgagacgacgggcgggtcagccgaaagcgagccaccgggggaagggcaggttcaattgcaagaaagtggaccgggcttagtcaaacccagccagaccctctccctgacctgcacagtcagcggagggtctgtgagctcaggcgactactattggacctggattagacaacgtccaggtaaaggtcttgagtggattggccacatctactatagcggtaacaccaactataatccgagcctgaaaagtcgtctgaccatcagcatcgacaccagcaaaacccagtttagcctgaaattaagcagcgttacagcagcggatacagcgatttactattgtgtccgtgatcgcgttactggcgcatttgatatttgggggcagggaacaatggttactgtgtcaagtggaggaggtggcagtgaactggttgttacacaagaaccgtccttaacagttagtccggggggcaccgtcacattaacatgtcgttcaagtacaggtgcagtaaccacgtccaactatgcaaattgggttcaacagaagcccggacaggccccgagaggtttaataggtggaacaaacaaaagagcacctggtacacctgcccggttctccggatcctctctcggcggttccgcagcattaaccttaagtggtgttcagccggaagatgaagcggagtattactgcgcactttggtatagcaacttatgggtgtttggaggcggtacaaaattgaccgttctgggtgcgacgccgcccgaaacgggcgcggagacggagtccccaggtgaaaccactggtggaagcgcagaatcagagccaccgggcgagggggaagtacaattacaggagtccggcggaggtctggttcagcctggtggtagcctcaaactgtcctgcgcagcaagcggttttacctttaacacctacgccatgaactgggtgcgtcaagctcctggtaaaggcttagaatgggttgcgcgtattcgtagcaaatacaacaactatgccacctattacgcggacagtgtaaaagaccgtttcaccatcagccgcgatgatagcaaaaatacagcctatctgcagatgaacaacctgaagaccgaagacacggccgtctactactgcgtgcgtcatggcaattttggcaacagctatgttagctggttcgcgtattggggccagggaacactggtcacggtttcctcagggactgctgaggcggctagcgcctccggagaagctggaagaagcgccaatcacacaccagctggacttacaggcccgcctggtagccccgcggggagccctacaagcactgaggagggcacatctgagtccgctacccctgagagtggacccgggacaagcactgagcctagcgaaggaagcgcaccaggttcccccgctgggagccccacaagcacagaagagggaacttctaccgagccctctgagggctcagcccctggaactagcacagagccctccgaaggcagtgcaccgggtacttccgaaagcgcaactccggaatccggccctggttctgagcctgctacttccggctctgaaactccaggtagcgagccagcgacttctggttctgaaactccaggttcaccggcgggtagcccgacgagcacggaggaaggtacctctgagtcggccactcctgagtccggtccgggcacgagcaccgagccgagcgagggttcagccccgggtaccagcacggagccgtccgagggtagcgcaccgggttctccggcgggctcccctacgtctacggaagagggtacgtccactgaacctagcgagggcagcgcgccaggcaccagcactgaaccgagcgaaggcagcgcacctggcactagcgagtctgcgactccggagagcggtccgggtacgagcacggaaccaagcgaaggcagcgccccaggtacctctgaatctgctaccccagaatctggcccgggttccgagccagctacctctggttctgaaaccccaggtacttccactgaaccaagcgaaggtagcgctcctggcacttctactgaaccatccgaaggttccgctcctggtacgtctgaaagcgctacccctgaaagcggcccaggcacctctgaaagcgctactcctgagagcggtccaggctctccagcaggttctccaacctccactgaagaaggcacctctgagtctgctacccctgaatctggtcctggctccgaacctgctacctctggttccgaaactccaggtacctcggaatctgcgactccggaatctggcccgggcacgagcacggagccgtctgagggtagcgcaccaggtaccagcactgagccttctgagggctctgcaccgggtacctccacggaaccttcggaaggttctgcgccgggtacctccactgagccatccgagggttcagcaccaggtactagcacggaaccgtccgagggctctgcaccaggtacgagcaccgaaccgtcggagggtagcgctccaggtagcccagcgggctctccgacaagcaccgaagaaggcaccagcaccgagccgtccgaaggttccgcaccaggtacaagcgagagcgcgactcctgaatctggtccgggtagcgagcctgcaaccagcggttctgagacgccgggcacttccgaatctgcgaccccggagtccggtccaggttcagagccggcgacgagcggttcggaaacgccgggtacgtctgaatcagccacgccggagtctggtccgggtacctcgaccgaaccaagcgaaggttcggcaccgggtactagcgagagcgcaacccctgaaagcggtccgggcagcccggcaggttctccaaccagcaccgaagaaggttcccctgctggtagcccgacctctacggaggaaggtagccctgcaggttccccaacttctactgaggaaggtacttctgagtccgctaccccagaaagcggtcctggtacctccactgaaccgtctgaaggctctgcaccaggcacttctgagtctgctactccagaaagcggcccaggttctgaaccagcaacttctggctctgagactccaggcacttctgagtccgcaacgcctgaatccggtcctggttctgaaccagctacttccggcagcgaaaccccaggtacctctgagtctgcgactccagagtctggtcctggtacttccactgagcctagcgagggttccgcaccaggttctccggctggtagcccgaccagcacggaggagggtacgtctgaatctgcaacgccggaatcgggcccaggttcggagcctgcaacgtctggcagcgaaaccccgggtacctccgaatctgctacaccggaaagcggtcctggcagccctgctggttctccaacctctaccgaggagggttcaccggcaggtagcccgactagcactgaagaaggtactagcacggagccgagcgagggtagtgctccgggtacgagcgagagcgcaacgccagagagcggtccaggcaccagcgaatcggccacccctgagagcggcccaggtacttctgagagcgccactcctgaatccggccctggtagcgagccggcaacctccggctcagaaactcctggttcggaaccagcgaccagcggttctgaaactccgggtagcccggcaggcagcccaacgagcaccgaagagggtaccagcacggaaccgagcgagggttctgccccgggtacttccaccgaaccatcggagggctctgcacctggtagcgaacctgcgacgtctggttctgaaacgccgggtaccagcgaaagcgctaccccagaatccggtccgggcactagcaccgagccatcggagggcgccgcagaaccagaggcg

SEQ ID NO: 949 - DNA, 5229 bp, Artificial Sequence
  Description of Artificial Sequence: Synthetic polynucleotide
caccatcatcaccatcactccccagcaggcagcccgaccagcaccgaggagggtacgagcgagtcggctactccagagagcggtccgggtacctctacggaaccgtccgaaggtagcgctccaggcacgtctgaaagcgcgacgccggaaagcggtccaggcagcgagccggcgacctccggtagcgaaacgcctggtacctcggagtcagcgactccggaaagcggtccgggtagcgaacctgcaacgagcggtagcgagactccaggcactagcgaatccgcaactccggagtcgggtccgggcacctctacggagcctagcgagggctcagcaccaggtagccctgcaggttccccgacgtcaaccgaggaaggtacaagcgaaagcgccacccctgagtcgggccctggcagcgaaccggcaactagcggcagcgagactccgggtaccagcgagtctgctacgccagagagcggcccaggttcgccagcgggttcgccgactagcacggaggagggcagcccagcgggtagcccgaccagcactgaggagggtacgtccaccgaaccgagcgaaggtagcgcaccaggtacctccgagtctgccacccctgaatccggtccaggtaccagcgaatcagccaccccggagtcgggtccaggtacgagcgaatctgctaccccggaatccggcccaggcagcgaacctgctactagcggcagcgaaacgccgggcagcgaacctgccacgtcaggcagcgagacgccgggttcccctgcaggctccccgaccagcactgaggagggcacctccaccgaaccatcagaaggtagcgcgcctggtacgtcaaccgaaccttccgagggcagcgcaccgggtggctcagcgcctgaggcaggtcgttctgctaaccatacccctgcaggattaactggccccgccaccagcgggagcgagacccccgggactgatatccagatgacccaaagccctagttcattaagcgcatcggtgggtgaccgggtaaccattacctgtcaagcaagtcaggatatcagcaactacctgaactggtaccagcagaaacccggaaaagcgccgaaactgctgatctatgatgccagcaatctggaaacaggtgttcctagccgtttctctggatcaggttcaggaaccgattttacattcaccattagctcattacagccggaggataccgcgacgtatttttgccagcacttcgatcatctgcctttagcatttggcggcggtactaaagtggagatcaaaggagcgacgccgcctgagactggagcagagaccgaatcacctggtgagacgacgggcgggtcagccgaaagcgagccaccgggggaagggcaggttcaattgcaagaaagtggaccgggcgccgtcaaacccagccagaccctctccctgacctgcacagtcagcggagggtctgtgagctcaggcgactactattggacctggattagacaacgtccaggtaaaggtcttgagtggattggccacatctactatagcggtaacaccaactataatccgagcctgaaaagtcgtctgaccatcagcatcgacaccagcaaaacccagtttagcctgaaattaagcagcgttacagcagcggatacagcgacctactattgtgtccgtgatcgcgttactggcgcatttgatatttgggggcagggaacagcagttactgtgtcaagtggaggaggtggcagtgaactggttgttacacaagaaccgtccttaacagttagtccggggggcaccgtcacattaacatgtcgttcaagtacaggtgcagtaaccacgtccaactatgcaaattgggttcaacagaagcccggacaggccccgagaggtttaataggtggaacaaacaaaagagcacctggtacacctgcccggttctccggatcctctctcggcggttccgcagcattaaccttaagtggtgttcagccggaagatgaagcggagtattactgcgcactttggtatagcaacttatgggtgtttggaggcggtacaaaattgaccgttctgggtgcgacgccgcccgaaacgggcgcggagacggagtccccaggtgaaaccactggtggaagcgcagaatcagagccaccgggcgagggggaagtacaattacaggagtccggcggaggtctggttcagcctggtggtagcctcaaactgtcctgcgcagcaagcggttttacctttaacacctacgccatgaactgggtgcgtcaagctcctggtaaaggcttagaatgggttgcgcgtattcgtagcaaatacaacaactatgccacctattacgcggacagtgtaaaagaccgtttcaccatcagccgcgatgatagcaaaaatacagcctatctgcagatgaacaacctgaagaccgaagacacggccgtctactactgcgtgcgtcatggcaattttggcaacagctatgttagctggttcgcgtattggggccagggaacactggtcacggtttcctcagggactgctgaggcggctagcgcctccggagaagctggaagaagcgccaatcacacaccagctggacttacaggcccgcctggtagccccgcggggagccctacaagcactgaggagggcacatctgagtccgctacccctgagagtggacccgggacaagcactgagcctagcgaaggaagcgcaccaggttcccccgctgggagccccacaagcacagaagagggaacttctaccgagccctctgagggctcagcccctggaactagcacagagccctccgaaggcagtgcaccgggtacttccgaaagcgcaactccggaatccggccctggttctgagcctgctacttccggctctgaaactccaggtagcgagccagcgacttctggttctgaaactccaggttcaccggcgggtagcccgacgagcacggaggaaggtacctctgagtcggccactcctgagtccggtccgggcacgagcaccgagccgagcgagggttcagccccgggtaccagcacggagccgtccgagggtagcgcaccgggttctccggcgggctcccctacgtctacggaagagggtacgtccactgaacctagcgagggcagcgcgccaggcaccagcactgaaccgagcgaaggcagcgcacctggcactagcgagtctgcgactccggagagcggtccgggtacgagcacggaaccaagcgaaggcagcgccccaggtacctctgaatctgctaccccagaatctggcccgggttccgagccagctacctctggttctgaaaccccaggtacttccactgaaccaagcgaaggtagcgctcctggcacttctactgaaccatccgaaggttccgctcctggtacgtctgaaagcgctacccctgaaagcggcccaggcacctctgaaagcgctactcctgagagcggtccaggctctccagcaggttctccaacctccactgaagaaggcacctctgagtctgctacccctgaatctggtcctggctccgaacctgctacctctggttccgaaactccaggtacctcggaatctgcgactccggaatctggcccgggcacgagcacggagccgtctgagggtagcgcaccaggtaccagcactgagccttctgagggctctgcaccgggtacctccacggaaccttcggaaggttctgcgccgggtacctccactgagccatccgagggttcagcaccaggtactagcacggaaccgtccgagggctctgcaccaggtacgagcaccgaaccgtcggagggtagcgctccaggtagcccagcgggctctccgacaagcaccgaagaaggcaccagcaccgagccgtccgaaggttccgcaccaggtacaagcgagagcgcgactcctgaatctggtccgggtagcgagcctgcaaccagcggttctgagacgccgggcacttccgaatctgcgaccccggagtccggtccaggttcagagccggcgacgagcggttcggaaacgccgggtacgtctgaatcagccacgccggagtctggtccgggtacctcgaccgaaccaagcgaaggttcggcaccgggtactagcgagagcgcaacccctgaaagcggtccgggcagcccggcaggttctccaaccagcaccgaagaaggttcccctgctggtagcccgacctctacggaggaaggtagccctgcaggttccccaacttctactgaggaaggtacttctgagtccgctaccccagaaagcggtcctggtacctccactgaaccgtctgaaggctctgcaccaggcacttctgagtctgctactccagaaagcggcccaggttctgaaccagcaacttctggctctgagactccaggcacttctgagtccgcaacgcctgaatccggtcctggttctgaaccagctacttccggcagcgaaaccccaggtacctctgagtctgcgactccagagtctggtcctggtacttccactgagcctagcgagggttccgcaccaggttctccggctggtagcccgaccagcacggaggagggtacgtctgaatctgcaacgccggaatcgggcccaggttcggagcctgcaacgtctggcagcgaaaccccgggtacctccgaatctgctacaccggaaagcggtcctggcagccctgctggttctccaacctctaccgaggagggttcaccggcaggtagcccgactagcactgaagaaggtactagcacggagccgagcgagggtagtgctccgggtacgagcgagagcgcaacgccagagagcggtccaggcaccagcgaatcggccacccctgagagcggcccaggtacttctgagagcgccactcctgaatccggccctggtagcgagccggcaacctccggctcagaaactcctggttcggaaccagcgaccagcggttctgaaactccgggtagcccggcaggcagcccaacgagcaccgaagagggtaccagcacggaaccgagcgagggttctgccccgggtacttccaccgaaccatcggagggctctgcacctggtagcgaacctgcgacgtctggttctgaaacgccgggtaccagcgaaagcgctaccccagaatccggtccgggcactagcaccgagccatcggagggcgccgcagaaccagaggcg

SEQ ID NO: 950 - DNA, 5229 bp, Artificial Sequence
  Description of Artificial Sequence: Synthetic polynucleotide
caccatcatcaccatcactccccagcaggcagcccgaccagcaccgaggagggtacgagcgagtcggctactccagagagcggtccgggtacctctacggaaccgtccgaaggtagcgctccaggcacgtctgaaagcgcgacgccggaaagcggtccaggcagcgagccggcgacctccggtagcgaaacgcctggtacctcggagtcagcgactccggaaagcggtccgggtagcgaacctgcaacgagcggtagcgagactccaggcactagcgaatccgcaactccggagtcgggtccgggcacctctacggagcctagcgagggctcagcaccaggtagccctgcaggttccccgacgtcaaccgaggaaggtacaagcgaaagcgccacccctgagtcgggccctggcagcgaaccggcaactagcggcagcgagactccgggtaccagcgagtctgctacgccagagagcggcccaggttcgccagcgggttcgccgactagcacggaggagggcagcccagcgggtagcccgaccagcactgaggagggtacgtccaccgaaccgagcgaaggtagcgcaccaggtacctccgagtctgccacccctgaatccggtccaggtaccagcgaatcagccaccccggagtcgggtccaggtacgagcgaatctgctaccccggaatccggcccaggcagcgaacctgctactagcggcagcgaaacgccgggcagcgaacctgccacgtcaggcagcgagacgccgggttcccctgcaggctccccgaccagcactgaggagggcacctccaccgaaccatcagaaggtagcgcgcctggtacgtcaaccgaaccttccgagggcagcgcaccgggtggctcagcgcctgaggcaggtcgttctgctaaccatacccctgcaggattaactggccccgccaccagcgggagcgagacccccgggactgatatccagatgacccaaagccctagttcattaagcgcatcggtgggtgaccgggtaaccattacctgtcaagcaagtcaggatatcagcaactacctgaactggtaccagcagaaacccggaaaagcgccgaaactgctgatctatgatgccagcaatctggaaacaggtgttcctagccgtttctctggatcaggttcaggaaccgattttacattcaccattagctcattacagccggaggataccgcgacgtatttttgccagcacttcgatcatctgcctttagcatttggcggcggtactaaagtggagatcaaaggagcgacgccgcctgagactggagcagagaccgaatcacctggtgagacgacgggcgggtcagccgaaagcgagccaccgggggaagggcaggttcaattgcaagaaagtggaccgggcgccgtcaaacccagccagaccctctccctgacctgcacagtcagcggagggtctgtgagctcaggcgactactattggacctggattagacaacgtccaggtaaaggtcttgagtggattggccacatctactatagcggtaacaccaactataatccgagcctgaaaagtcgtctgaccatcagcatcgacaccagcaaaacccagtttagcctgaaattaagcagcgttacagcagcggatacagcgacctactattgtgtccgtgatcgcgttactggcgcatttgatatttgggggcagggaacaacagttactgtgtcaagtggaggaggtggcagtgaactggttgttacacaagaaccgtccttaacagttagtccggggggcaccgtcacattaacatgtcgttcaagtacaggtgcagtaaccacgtccaactatgcaaattgggttcaacagaagcccggacaggccccgagaggtttaataggtggaacaaacaaaagagcacctggtacacctgcccggttctccggatcctctctcggcggttccgcagcattaaccttaagtggtgttcagccggaagatgaagcggagtattactgcgcactttggtatagcaacttatgggtgtttggaggcggtacaaaattgaccgttctgggtgcgacgccgcccgaaacgggcgcggagacggagtccccaggtgaaaccactggtggaagcgcagaatcagagccaccgggcgagggggaagtacaattacaggagtccggcggaggtctggttcagcctggtggtagcctcaaactgtcctgcgcagcaagcggttttacctttaacacctacgccatgaactgggtgcgtcaagctcctggtaaaggcttagaatgggttgcgcgtattcgtagcaaatacaacaactatgccacctattacgcggacagtgtaaaagaccgtttcaccatcagccgcgatgatagcaaaaatacagcctatctgcagatgaacaacctgaagaccgaagacacggccgtctactactgcgtgcgtcatggcaattttggcaacagctatgttagctggttcgcgtattggggccagggaacactggtcacggtttcctcagggactgctgaggcggctagcgcctccggagaagctggaagaagcgccaatcacacaccagctggacttacaggcccgcctggtagccccgcggggagccctacaagcactgaggagggcacatctgagtccgctacccctgagagtggacccgggacaagcactgagcctagcgaaggaagcgcaccaggttcccccgctgggagccccacaagcacagaagagggaacttctaccgagccctctgagggctcagcccctggaactagcacagagccctccgaaggcagtgcaccgggtacttccgaaagcgcaactccggaatccggccctggttctgagcctgctacttccggctctgaaactccaggtagcgagccagcgacttctggttctgaaactccaggttcaccggcgggtagcccgacgagcacggaggaaggtacctctgagtcggccactcctgagtccggtccgggcacgagcaccgagccgagcgagggttcagccccgggtaccagcacggagccgtccgagggtagcgcaccgggttctccggcgggctcccctacgtctacggaagagggtacgtccactgaacctagcgagggcagcgcgccaggcaccagcactgaaccgagcgaaggcagcgcacctggcactagcgagtctgcgactccggagagcggtccgggtacgagcacggaaccaagcgaaggcagcgccccaggtacctctgaatctgctaccccagaatctggcccgggttccgagccagctacctctggttctgaaaccccaggtacttccactgaaccaagcgaaggtagcgctcctggcacttctactgaaccatccgaaggttccgctcctggtacgtctgaaagcgctacccctgaaagcggcccaggcacctctgaaagcgctactcctgagagcggtccaggctctccagcaggttctccaacctccactgaagaaggcacctctgagtctgctacccctgaatctggtcctggctccgaacctgctacctctggttccgaaactccaggtacctcggaatctgcgactccggaatctggcccgggcacgagcacggagccgtctgagggtagcgcaccaggtaccagcactgagccttctgagggctctgcaccgggtacctccacggaaccttcggaaggttctgcgccgggtacctccactgagccatccgagggttcagcaccaggtactagcacggaaccgtccgagggctctgcaccaggtacgagcaccgaaccgtcggagggtagcgctccaggtagcccagcgggctctccgacaagcaccgaagaaggcaccagcaccgagccgtccgaaggttccgcaccaggtacaagcgagagcgcgactcctgaatctggtccgggtagcgagcctgcaaccagcggttctgagacgccgggcacttccgaatctgcgaccccggagtccggtccaggttcagagccggcgacgagcggttcggaaacgccgggtacgtctgaatcagccacgccggagtctggtccgggtacctcgaccgaaccaagcgaaggttcggcaccgggtactagcgagagcgcaacccctgaaagcggtccgggcagcccggcaggttctccaaccagcaccgaagaaggttcccctgctggtagcccgacctctacggaggaaggtagccctgcaggttccccaacttctactgaggaaggtacttctgagtccgctaccccagaaagcggtcctggtacctccactgaaccgtctgaaggctctgcaccaggcacttctgagtctgctactccagaaagcggcccaggttctgaaccagcaacttctggctctgagactccaggcacttctgagtccgcaacgcctgaatccggtcctggttctgaaccagctacttccggcagcgaaaccccaggtacctctgagtctgcgactccagagtctggtcctggtacttccactgagcctagcgagggttccgcaccaggttctccggctggtagcccgaccagcacggaggagggtacgtctgaatctgcaacgccggaatcgggcccaggttcggagcctgcaacgtctggcagcgaaaccccgggtacctccgaatctgctacaccggaaagcggtcctggcagccctgctggttctccaacctctaccgaggagggttcaccggcaggtagcccgactagcactgaagaaggtactagcacggagccgagcgagggtagtgctccgggtacgagcgagagcgcaacgccagagagcggtccaggcaccagcgaatcggccacccctgagagcggcccaggtacttctgagagcgccactcctgaatccggccctggtagcgagccggcaacctccggctcagaaactcctggttcggaaccagcgaccagcggttctgaaactccgggtagcccggcaggcagcccaacgagcaccgaagagggtaccagcacggaaccgagcgagggttctgccccgggtacttccaccgaaccatcggagggctctgcacctggtagcgaacctgcgacgtctggttctgaaacgccgggtaccagcgaaagcgctaccccagaatccggtccgggcactagcaccgagccatcggagggcgccgcagaaccagaggcg

SEQ ID NO: 951 - DNA, 5229 bp, Artificial Sequence
  Description of Artificial Sequence: Synthetic polynucleotide
caccatcatcaccatcactccccagcaggcagcccgaccagcaccgaggagggtacgagcgagtcggctactccagagagcggtccgggtacctctacggaaccgtccgaaggtagcgctccaggcacgtctgaaagcgcgacgccggaaagcggtccaggcagcgagccggcgacctccggtagcgaaacgcctggtacctcggagtcagcgactccggaaagcggtccgggtagcgaacctgcaacgagcggtagcgagactccaggcactagcgaatccgcaactccggagtcgggtccgggcacctctacggagcctagcgagggctcagcaccaggtagccctgcaggttccccgacgtcaaccgaggaaggtacaagcgaaagcgccacccctgagtcgggccctggcagcgaaccggcaactagcggcagcgagactccgggtaccagcgagtctgctacgccagagagcggcccaggttcgccagcgggttcgccgactagcacggaggagggcagcccagcgggtagcccgaccagcactgaggagggtacgtccaccgaaccgagcgaaggtagcgcaccaggtacctccgagtctgccacccctgaatccggtccaggtaccagcgaatcagccaccccggagtcgggtccaggtacgagcgaatctgctaccccggaatccggcccaggcagcgaacctgctactagcggcagcgaaacgccgggcagcgaacctgccacgtcaggcagcgagacgccgggttcccctgcaggctccccgaccagcactgaggagggcacctccaccgaaccatcagaaggtagcgcgcctggtacgtcaaccgaaccttccgagggcagcgcaccgggtggctcagcgcctgaggcaggtcgttctgctaaccatacccctgcaggattaactggccccgccaccagcgggagcgagacccccgggactgatatccagatgacccaaagccctagttcattaagcgcatcggtgggtgaccgggtaaccattacctgtcaagcaagtcaggatatcagcaactacctgaactggtaccagcagaaacccggaaaagcgccgaaactgctgatctatgatgccagcaatctggaaacaggtgttcctagccgtttctctggatcaggttcaggaaccgattttacattcaccattagccgtttacagccggaggatatcgcgacgtatttttgccagcacttcgatcatctgcctttagcatttggcggcggtactaaagtggagatcaaaggagcgacgccgcctgagactggagcagagaccgaatcacctggtgagacgacgggcgggtcagccgaaagcgagccaccgggggaagggcaggttcaattgcaagaaagtggaccgggcgccgtcaaacccagcgaaaccctctccctgacctgcacagtcagcggagggtctgtgagctcaggcgactactattggacctggattagacaatcaccaggtaaaggtcttgagtggattggccacatctactatagcggtaacaccaactataatccgagcctgaaaagtcgtctgaccatcagcatcgacaccagcaaaacccagtttagcctgaaattaagcagcgttacagcagcggatacagcgacctactattgtgtccgtgatcgcgttactggcgcatttgatatttgggggcagggaacagcagttactgtgtcaagtggaggaggtggcagtgaactggttgttacacaagaaccgtccttaacagttagtccggggggcaccgtcacattaacatgtcgttcaagtacaggtgcagtaaccacgtccaactatgcaaattgggttcaacagaagcccggacaggccccgagaggtttaataggtggaacaaacaaaagagcacctggtacacctgcccggttctccggatcctctctcggcggttccgcagcattaaccttaagtggtgttcagccggaagatgaagcggagtattactgcgcactttggtatagcaacttatgggtgtttggaggcggtacaaaattgaccgttctgggtgcgacgccgcccgaaacgggcgcggagacggagtccccaggtgaaaccactggtggaagcgcagaatcagagccaccgggcgagggggaagtacaattacaggagtccggcggaggtctggttcagcctggtggtagcctcaaactgtcctgcgcagcaagcggttttacctttaacacctacgccatgaactgggtgcgtcaagctcctggtaaaggcttagaatgggttgcgcgtattcgtagcaaatacaacaactatgccacctattacgcggacagtgtaaaagaccgtttcaccatcagccgcgatgatagcaaaaatacagcctatctgcagatgaacaacctgaagaccgaagacacggccgtctactactgcgtgcgtcatggcaattttggcaacagctatgttagctggttcgcgtattggggccagggaacactggtcacggtttcctcagggactgctgaggcggctagcgcctccggagaagctggaagaagcgccaatcacacaccagctggacttacaggcccgcctggtagccccgcggggagccctacaagcactgaggagggcacatctgagtccgctacccctgagagtggacccgggacaagcactgagcctagcgaaggaagcgcaccaggttcccccgctgggagccccacaagcacagaagagggaacttctaccgagccctctgagggctcagcccctggaactagcacagagccctccgaaggcagtgcaccgggtacttccgaaagcgcaactccggaatccggccctggttctgagcctgctacttccggctctgaaactccaggtagcgagccagcgacttctggttctgaaactccaggttcaccggcgggtagcccgacgagcacggaggaaggtacctctgagtcggccactcctgagtccggtccgggcacgagcaccgagccgagcgagggttcagccccgggtaccagcacggagccgtccgagggtagcgcaccgggttctccggcgggctcccctacgtctacggaagagggtacgtccactgaacctagcgagggcagcgcgccaggcaccagcactgaaccgagcgaaggcagcgcacctggcactagcgagtctgcgactccggagagcggtccgggtacgagcacggaaccaagcgaaggcagcgccccaggtacctctgaatctgctaccccagaatctggcccgggttccgagccagctacctctggttctgaaaccccaggtacttccactgaaccaagcgaaggtagcgctcctggcacttctactgaaccatccgaaggttccgctcctggtacgtctgaaagcgctacccctgaaagcggcccaggcacctctgaaagcgctactcctgagagcggtccaggctctccagcaggttctccaacctccactgaagaaggcacctctgagtctgctacccctgaatctggtcctggctccgaacctgctacctctggttccgaaactccaggtacctcggaatctgcgactccggaatctggcccgggcacgagcacggagccgtctgagggtagcgcaccaggtaccagcactgagccttctgagggctctgcaccgggtacctccacggaaccttcggaaggttctgcgccgggtacctccactgagccatccgagggttcagcaccaggtactagcacggaaccgtccgagggctctgcaccaggtacgagcaccgaaccgtcggagggtagcgctccaggtagcccagcgggctctccgacaagcaccgaagaaggcaccagcaccgagccgtccgaaggttccgcaccaggtacaagcgagagcgcgactcctgaatctggtccgggtagcgagcctgcaaccagcggttctgagacgccgggcacttccgaatctgcgaccccggagtccggtccaggttcagagccggcgacgagcggttcggaaacgccgggtacgtctgaatcagccacgccggagtctggtccgggtacctcgaccgaaccaagcgaaggttcggcaccgggtactagcgagagcgcaacccctgaaagcggtccgggcagcccggcaggttctccaaccagcaccgaagaaggttcccctgctggtagcccgacctctacggaggaaggtagccctgcaggttccccaacttctactgaggaaggtacttctgagtccgctaccccagaaagcggtcctggtacctccactgaaccgtctgaaggctctgcaccaggcacttctgagtctgctactccagaaagcggcccaggttctgaaccagcaacttctggctctgagactccaggcacttctgagtccgcaacgcctgaatccggtcctggttctgaaccagctacttccggcagcgaaaccccaggtacctctgagtctgcgactccagagtctggtcctggtacttccactgagcctagcgagggttccgcaccaggttctccggctggtagcccgaccagcacggaggagggtacgtctgaatctgcaacgccggaatcgggcccaggttcggagcctgcaacgtctggcagcgaaaccccgggtacctccgaatctgctacaccggaaagcggtcctggcagccctgctggttctccaacctctaccgaggagggttcaccggcaggtagcccgactagcactgaagaaggtactagcacggagccgagcgagggtagtgctccgggtacgagcgagagcgcaacgccagagagcggtccaggcaccagcgaatcggccacccctgagagcggcccaggtacttctgagagcgccactcctgaatccggccctggtagcgagccggcaacctccggctcagaaactcctggttcggaaccagcgaccagcggttctgaaactccgggtagcccggcaggcagcccaacgagcaccgaagagggtaccagcacggaaccgagcgagggttctgccccgggtacttccaccgaaccatcggagggctctgcacctggtagcgaacctgcgacgtctggttctgaaacgccgggtaccagcgaaagcgctaccccagaatccggtccgggcactagcaccgagccatcggagggcgccgcagaaccagaggcg

SEQ ID NO: 952 - DNA, 5229 bp, Artificial Sequence
  Description of Artificial Sequence: Synthetic polynucleotide
caccatcatcaccatcactccccagcaggcagcccgaccagcaccgaggagggtacgagcgagtcggctactccagagagcggtccgggtacctctacggaaccgtccgaaggtagcgctccaggcacgtctgaaagcgcgacgccggaaagcggtccaggcagcgagccggcgacctccggtagcgaaacgcctggtacctcggagtcagcgactccggaaagcggtccgggtagcgaacctgcaacgagcggtagcgagactccaggcactagcgaatccgcaactccggagtcgggtccgggcacctctacggagcctagcgagggctcagcaccaggtagccctgcaggttccccgacgtcaaccgaggaaggtacaagcgaaagcgccacccctgagtcgggccctggcagcgaaccggcaactagcggcagcgagactccgggtaccagcgagtctgctacgccagagagcggcccaggttcgccagcgggttcgccgactagcacggaggagggcagcccagcgggtagcccgaccagcactgaggagggtacgtccaccgaaccgagcgaaggtagcgcaccaggtacctccgagtctgccacccctgaatccggtccaggtaccagcgaatcagccaccccggagtcgggtccaggtacgagcgaatctgctaccccggaatccggcccaggcagcgaacctgctactagcggcagcgaaacgccgggcagcgaacctgccacgtcaggcagcgagacgccgggttcccctgcaggctccccgaccagcactgaggagggcacctccaccgaaccatcagaaggtagcgcgcctggtacgtcaaccgaaccttccgagggcagcgcaccgggtggctcagcgcctgaggcaggtcgttctgctaaccatacccctgcaggattaactggccccgccaccagcgggagcgagacccccgggactgatatccagatgacccaaagccctagttcattaagcgcatcggtgggtgaccgggtaaccattacctgtcaagcaagtcaggatatcagcaactacctgaactggtaccagcagaaacccggaaaagcgccgaaactgctgatctatgatgccagcaatctggaaacaggtgttcctagccgtttctctggatcaggttcaggaaccgattttacattcaccattagccgtttacagccggaggatatcgcgacgtatttttgccagcacttcgatcatctgcctttagcatttggcggcggtactaaagtggagatcaaaggagcgacgccgcctgagactggagcagagaccgaatcacctggtgagacgacgggcgggtcagccgaaagcgagccaccgggggaagggcaggttcaattgcaagaaagtggaccgggcgccgtcaaacccagcgaaaccctctccctgacctgcacagtcagcggagggtctgtgagctcaggcgactactattggacctggattagacaatcaccaggtaaaggtcttgagtggattggccacatctactatagcggtaacaccaactataatccgagcctgaaaagtcgtctgaccatcagcatcgacaccagcaaaacccagtttagcctgaaattaagcagcgttacagcagcggatacagcgacctactattgtgtccgtgatcgcgttactggcgcatttgatatttgggggcagggaacaacagttactgtgtcaagtggaggaggtggcagtgaactggttgttacacaagaaccgtccttaacagttagtccggggggcaccgtcacattaacatgtcgttcaagtacaggtgcagtaaccacgtccaactatgcaaattgggttcaacagaagcccggacaggccccgagaggtttaataggtggaacaaacaaaagagcacctggtacacctgcccggttctccggatcctctctcggcggttccgcagcattaaccttaagtggtgttcagccggaagatgaagcggagtattactgcgcactttggtatagcaacttatgggtgtttggaggcggtacaaaattgaccgttctgggtgcgacgccgcccgaaacgggcgcggagacggagtccccaggtgaaaccactggtggaagcgcagaatcagagccaccgggcgagggggaagtacaattacaggagtccggcggaggtctggttcagcctggtggtagcctcaaactgtcctgcgcagcaagcggttttacctttaacacctacgccatgaactgggtgcgtcaagctcctggtaaaggcttagaatgggttgcgcgtattcgtagcaaatacaacaactatgccacctattacgcggacagtgtaaaagaccgtttcaccatcagccgcgatgatagcaaaaatacagcctatctgcagatgaacaacctgaagaccgaagacacggccgtctactactgcgtgcgtcatggcaattttggcaacagctatgttagctggttcgcgtattggggccagggaacactggtcacggtttcctcagggactgctgaggcggctagcgcctccggagaagctggaagaagcgccaatcacacaccagctggacttacaggcccgcctggtagccccgcggggagccctacaagcactgaggagggcacatctgagtccgctacccctgagagtggacccgggacaagcactgagcctagcgaaggaagcgcaccaggttcccccgctgggagccccacaagcacagaagagggaacttctaccgagccctctgagggctcagcccctggaactagcacagagccctccgaaggcagtgcaccgggtacttccgaaagcgcaactccggaatccggccctggttctgagcctgctacttccggctctgaaactccaggtagcgagccagcgacttctggttctgaaactccaggttcaccggcgggtagcccgacgagcacggaggaaggtacctctgagtcggccactcctgagtccggtccgggcacgagcaccgagccgagcgagggttcagccccgggtaccagcacggagccgtccgagggtagcgcaccgggttctccggcgggctcccctacgtctacggaagagggtacgtccactgaacctagcgagggcagcgcgccaggcaccagcactgaaccgagcgaaggcagcgcacctggcactagcgagtctgcgactccggagagcggtccgggtacgagcacggaaccaagcgaaggcagcgccccaggtacctctgaatctgctaccccagaatctggcccgggttccgagccagctacctctggttctgaaaccccaggtacttccactgaaccaagcgaaggtagcgctcctggcacttctactgaaccatccgaaggttccgctcctggtacgtctgaaagcgctacccctgaaagcggcccaggcacctctgaaagcgctactcctgagagcggtccaggctctccagcaggttctccaacctccactgaagaaggcacctctgagtctgctacccctgaatctggtcctggctccgaacctgctacctctggttccgaaactccaggtacctcggaatctgcgactccggaatctggcccgggcacgagcacggagccgtctgagggtagcgcaccaggtaccagcactgagccttctgagggctctgcaccgggtacctccacggaaccttcggaaggttctgcgccgggtacctccactgagccatccgagggttcagcaccaggtactagcacggaaccgtccgagggctctgcaccaggtacgagcaccgaaccgtcggagggtagcgctccaggtagcccagcgggctctccgacaagcaccgaagaaggcaccagcaccgagccgtccgaaggttccgcaccaggtacaagcgagagcgcgactcctgaatctggtccgggtagcgagcctgcaaccagcggttctgagacgccgggcacttccgaatctgcgaccccggagtccggtccaggttcagagccggcgacgagcggttcggaaacgccgggtacgtctgaatcagccacgccggagtctggtccgggtacctcgaccgaaccaagcgaaggttcggcaccgggtactagcgagagcgcaacccctgaaagcggtccgggcagcccggcaggttctccaaccagcaccgaagaaggttcccctgctggtagcccgacctctacggaggaaggtagccctgcaggttccccaacttctactgaggaaggtacttctgagtccgctaccccagaaagcggtcctggtacctccactgaaccgtctgaaggctctgcaccaggcacttctgagtctgctactccagaaagcggcccaggttctgaaccagcaacttctggctctgagactccaggcacttctgagtccgcaacgcctgaatccggtcctggttctgaaccagctacttccggcagcgaaaccccaggtacctctgagtctgcgactccagagtctggtcctggtacttccactgagcctagcgagggttccgcaccaggttctccggctggtagcccgaccagcacggaggagggtacgtctgaatctgcaacgccggaatcgggcccaggttcggagcctgcaacgtctggcagcgaaaccccgggtacctccgaatctgctacaccggaaagcggtcctggcagccctgctggttctccaacctctaccgaggagggttcaccggcaggtagcccgactagcactgaagaaggtactagcacggagccgagcgagggtagtgctccgggtacgagcgagagcgcaacgccagagagcggtccaggcaccagcgaatcggccacccctgagagcggcccaggtacttctgagagcgccactcctgaatccggccctggtagcgagccggcaacctccggctcagaaactcctggttcggaaccagcgaccagcggttctgaaactccgggtagcccggcaggcagcccaacgagcaccgaagagggtaccagcacggaaccgagcgagggttctgccccgggtacttccaccgaaccatcggagggctctgcacctggtagcgaacctgcgacgtctggttctgaaacgccgggtaccagcgaaagcgctaccccagaatccggtccgggcactagcaccgagccatcggagggcgccgcagaaccagaggcg

SEQ ID NO: 953 - DNA, 5229 bp, Artificial Sequence
  Description of Artificial Sequence: Synthetic polynucleotide
caccatcatcaccatcactccccagcaggcagcccgaccagcaccgaggagggtacgagcgagtcggctactccagagagcggtccgggtacctctacggaaccgtccgaaggtagcgctccaggcacgtctgaaagcgcgacgccggaaagcggtccaggcagcgagccggcgacctccggtagcgaaacgcctggtacctcggagtcagcgactccggaaagcggtccgggtagcgaacctgcaacgagcggtagcgagactccaggcactagcgaatccgcaactccggagtcgggtccgggcacctctacggagcctagcgagggctcagcaccaggtagccctgcaggttccccgacgtcaaccgaggaaggtacaagcgaaagcgccacccctgagtcgggccctggcagcgaaccggcaactagcggcagcgagactccgggtaccagcgagtctgctacgccagagagcggcccaggttcgccagcgggttcgccgactagcacggaggagggcagcccagcgggtagcccgaccagcactgaggagggtacgtccaccgaaccgagcgaaggtagcgcaccaggtacctccgagtctgccacccctgaatccggtccaggtaccagcgaatcagccaccccggagtcgggtccaggtacgagcgaatctgctaccccggaatccggcccaggcagcgaacctgctactagcggcagcgaaacgccgggcagcgaacctgccacgtcaggcagcgagacgccgggttcccctgcaggctccccgaccagcactgaggagggcacctccaccgaaccatcagaaggtagcgcgcctggtacgtcaaccgaaccttccgagggcagcgcaccgggtggctcagcgcctgaggcaggtcgttctgctaaccatacccctgcaggattaactggccccgccaccagcgggagcgagacccccgggactgatatccagatgacccaaagccctagttcattaagcgcatcggtgggtgaccgggtaaccattacctgtcaagcaagtcaggatatcagcaactacctgaactggtaccagcagaaacccggaaaagcgccgaaactgctgatctatgatgccagcaatctggaaacaggtgttcctagccgtttctctggatcaggttcaggaaccgattttacattcaccattagccgtttacagccggaggatatcgcgacgtatttttgccagcacttcgatcatctgcctttagcatttggcggcggtactaaagtggagatcaaaggagcgacgccgcctgagactggagcagagaccgaatcacctggtgagacgacgggcgggtcagccgaaagcgagccaccgggggaagggcaggttcaattgcaagaaagtggaccgggcttagtcaaacccagccagaccctctccctgacctgcacagtcagcggagggtctgtgagctcaggcgactactattggacctggattagacaacgtccaggtaaaggtcttgagtggattggccacatctactatagcggtaacaccaactataatccgagcctgaaaagtcgtctgaccatcagcatcgacaccagcaaaacccagtttagcctgaaattaagcagcgttacagcagcggatacagcgatttactattgtgtccgtgatcgcgttactggcgcatttgatatttgggggcagggaacaatggttactgtgtcaagtggaggaggtggcagtgaactggttgttacacaagaaccgtccttaacagttagtccggggggcaccgtcacattaacatgtcgttcaagtacaggtgcagtaaccacgtccaactatgcaaattgggttcaacagaagcccggacaggccccgagaggtttaataggtggaacaaacaaaagagcacctggtacacctgcccggttctccggatcctctctcggcggttccgcagcattaaccttaagtggtgttcagccggaagatgaagcggagtattactgcgcactttggtatagcaacttatgggtgtttggaggcggtacaaaattgaccgttctgggtgcgacgccgcccgaaacgggcgcggagacggagtccccaggtgaaaccactggtggaagcgcagaatcagagccaccgggcgagggggaagtacaattacaggagtccggcggaggtctggttcagcctggtggtagcctcaaactgtcctgcgcagcaagcggttttacctttaacacctacgccatgaactgggtgcgtcaagctcctggtaaaggcttagaatgggttgcgcgtattcgtagcaaatacaacaactatgccacctattacgcggacagtgtaaaagaccgtttcaccatcagccgcgatgatagcaaaaatacagcctatctgcagatgaacaacctgaagaccgaagacacggccgtctactactgcgtgcgtcatggcaattttggcaacagctatgttagctggttcgcgtattggggccagggaacactggtcacggtttcctcagggactgctgaggcggctagcgcctccggagaagctggaagaagcgccaatcacacaccagctggacttacaggcccgcctggtagccccgcggggagccctacaagcactgaggagggcacatctgagtccgctacccctgagagtggacccgggacaagcactgagcctagcgaaggaagcgcaccaggttcccccgctgggagccccacaagcacagaagagggaacttctaccgagccctctgagggctcagcccctggaactagcacagagccctccgaaggcagtgcaccgggtacttccgaaagcgcaactccggaatccggccctggttctgagcctgctacttccggctctgaaactccaggtagcgagccagcgacttctggttctgaaactccaggttcaccggcgggtagcccgacgagcacggaggaaggtacctctgagtcggccactcctgagtccggtccgggcacgagcaccgagccgagcgagggttcagccccgggtaccagcacggagccgtccgagggtagcgcaccgggttctccggcgggctcccctacgtctacggaagagggtacgtccactgaacctagcgagggcagcgcgccaggcaccagcactgaaccgagcgaaggcagcgcacctggcactagcgagtctgcgactccggagagcggtccgggtacgagcacggaaccaagcgaaggcagcgccccaggtacctctgaatctgctaccccagaatctggcccgggttccgagccagctacctctggttctgaaaccccaggtacttccactgaaccaagcgaaggtagcgctcctggcacttctactgaaccatccgaaggttccgctcctggtacgtctgaaagcgctacccctgaaagcggcccaggcacctctgaaagcgctactcctgagagcggtccaggctctccagcaggttctccaacctccactgaagaaggcacctctgagtctgctacccctgaatctggtcctggctccgaacctgctacctctggttccgaaactccaggtacctcggaatctgcgactccggaatctggcccgggcacgagcacggagccgtctgagggtagcgcaccaggtaccagcactgagccttctgagggctctgcaccgggtacctccacggaaccttcggaaggttctgcgccgggtacctccactgagccatccgagggttcagcaccaggtactagcacggaaccgtccgagggctctgcaccaggtacgagcaccgaaccgtcggagggtagcgctccaggtagcccagcgggctctccgacaagcaccgaagaaggcaccagcaccgagccgtccgaaggttccgcaccaggtacaagcgagagcgcgactcctgaatctggtccgggtagcgagcctgcaaccagcggttctgagacgccgggcacttccgaatctgcgaccccggagtccggtccaggttcagagccggcgacgagcggttcggaaacgccgggtacgtctgaatcagccacgccggagtctggtccgggtacctcgaccgaaccaagcgaaggttcggcaccgggtactagcgagagcgcaacccctgaaagcggtccgggcagcccggcaggttctccaaccagcaccgaagaaggttcccctgctggtagcccgacctctacggaggaaggtagccctgcaggttccccaacttctactgaggaaggtacttctgagtccgctaccccagaaagcggtcctggtacctccactgaaccgtctgaaggctctgcaccaggcacttctgagtctgctactccagaaagcggcccaggttctgaaccagcaacttctggctctgagactccaggcacttctgagtccgcaacgcctgaatccggtcctggttctgaaccagctacttccggcagcgaaaccccaggtacctctgagtctgcgactccagagtctggtcctggtacttccactgagcctagcgagggttccgcaccaggttctccggctggtagcccgaccagcacggaggagggtacgtctgaatctgcaacgccggaatcgggcccaggttcggagcctgcaacgtctggcagcgaaaccccgggtacctccgaatctgctacaccggaaagcggtcctggcagccctgctggttctccaacctctaccgaggagggttcaccggcaggtagcccgactagcactgaagaaggtactagcacggagccgagcgagggtagtgctccgggtacgagcgagagcgcaacgccagagagcggtccaggcaccagcgaatcggccacccctgagagcggcccaggtacttctgagagcgccactcctgaatccggccctggtagcgagccggcaacctccggctcagaaactcctggttcggaaccagcgaccagcggttctgaaactccgggtagcccggcaggcagcccaacgagcaccgaagagggtaccagcacggaaccgagcgagggttctgccccgggtacttccaccgaaccatcggagggctctgcacctggtagcgaacctgcgacgtctggttctgaaacgccgggtaccagcgaaagcgctaccccagaatccggtccgggcactagcaccgagccatcggagggcgccgcagaaccagaggcg

SEQ ID NO: 954 - DNA, 5229 bp, Artificial Sequence
  Description of Artificial Sequence: Synthetic polynucleotide
caccatcatcaccatcactccccagcaggcagcccgaccagcaccgaggagggtacgagcgagtcggctactccagagagcggtccgggtacctctacggaaccgtccgaaggtagcgctccaggcacgtctgaaagcgcgacgccggaaagcggtccaggcagcgagccggcgacctccggtagcgaaacgcctggtacctcggagtcagcgactccggaaagcggtccgggtagcgaacctgcaacgagcggtagcgagactccaggcactagcgaatccgcaactccggagtcgggtccgggcacctctacggagcctagcgagggctcagcaccaggtagccctgcaggttccccgacgtcaaccgaggaaggtacaagcgaaagcgccacccctgagtcgggccctggcagcgaaccggcaactagcggcagcgagactccgggtaccagcgagtctgctacgccagagagcggcccaggttcgccagcgggttcgccgactagcacggaggagggcagcccagcgggtagcccgaccagcactgaggagggtacgtccaccgaaccgagcgaaggtagcgcaccaggtacctccgagtctgccacccctgaatccggtccaggtaccagcgaatcagccaccccggagtcgggtccaggtacgagcgaatctgctaccccggaatccggcccaggcagcgaacctgctactagcggcagcgaaacgccgggcagcgaacctgccacgtcaggcagcgagacgccgggttcccctgcaggctccccgaccagcactgaggagggcacctccaccgaaccatcagaaggtagcgcgcctggtacgtcaaccgaaccttccgagggcagcgcaccgggtggctcagcgcctgaggcaggtcgttctgctaaccatacccctgcaggattaactggccccgccaccagcgggagcgagacccccgggactgatatccagatgacccaaagccctagttcattaagcgcatcggtgggtgaccgggtaaccattacctgtcaagcaagtcaggatatcagcaactacctgaactggtaccagcagaaacccggaaaagcgccgaaactgctgatctatgatgccagcaatctggaaacaggtgttcctagccgtttctctggatcaggttcaggaaccgattttacattcaccattagccgtttacagccggaggatatcgcgacgtatttttgccagcacttcgatcatctgcctttagcatttggcggcggtactaaagtggagatcaaaggagcgacgccgcctgagactggagcagagaccgaatcacctggtgagacgacgggcgggtcagccgaaagcgagccaccgggggaagggcaggttcaattgcaagaaagtggaccgggcgccgtcaaacccagccagaccctctccctgacctgcacagtcagcggagggtctgtgagctcaggcgactactattggacctggattagacaacgtccaggtaaaggtcttgagtggattggccacatctactatagcggtaacaccaactataatccgagcctgaaaagtcgtctgaccatcagcatcgacaccagcaaaacccagtttagcctgaaattaagcagcgttacagcagcggatacagcgacctactattgtgtccgtgatcgcgttactggcgcatttgatatttgggggcagggaacagcagttactgtgtcaagtggaggaggtggcagtgaactggttgttacacaagaaccgtccttaacagttagtccggggggcaccgtcacattaacatgtcgttcaagtacaggtgcagtaaccacgtccaactatgcaaattgggttcaacagaagcccggacaggccccgagaggtttaataggtggaacaaacaaaagagcacctggtacacctgcccggttctccggatcctctctcggcggttccgcagcattaaccttaagtggtgttcagccggaagatgaagcggagtattactgcgcactttggtatagcaacttatgggtgtttggaggcggtacaaaattgaccgttctgggtgcgacgccgcccgaaacgggcgcggagacggagtccccaggtgaaaccactggtggaagcgcagaatcagagccaccgggcgagggggaagtacaattacaggagtccggcggaggtctggttcagcctggtggtagcctcaaactgtcctgcgcagcaagcggttttacctttaacacctacgccatgaactgggtgcgtcaagctcctggtaaaggcttagaatgggttgcgcgtattcgtagcaaatacaacaactatgccacctattacgcggacagtgtaaaagaccgtttcaccatcagccgcgatgatagcaaaaatacagcctatctgcagatgaacaacctgaagaccgaagacacggccgtctactactgcgtgcgtcatggcaattttggcaacagctatgttagctggttcgcgtattggggccagggaacactggtcacggtttcctcagggactgctgaggcggctagcgcctccggagaagctggaagaagcgccaatcacacaccagctggacttacaggcccgcctggtagccccgcggggagccctacaagcactgaggagggcacatctgagtccgctacccctgagagtggacccgggacaagcactgagcctagcgaaggaagcgcaccaggttcccccgctgggagccccacaagcacagaagagggaacttctaccgagccctctgagggctcagcccctggaactagcacagagccctccgaaggcagtgcaccgggtacttccgaaagcgcaactccggaatccggccctggttctgagcctgctacttccggctctgaaactccaggtagcgagccagcgacttctggttctgaaactccaggttcaccggcgggtagcccgacgagcacggaggaaggtacctctgagtcggccactcctgagtccggtccgggcacgagcaccgagccgagcgagggttcagccccgggtaccagcacggagccgtccgagggtagcgcaccgggttctccggcgggctcccctacgtctacggaagagggtacgtccactgaacctagcgagggcagcgcgccaggcaccagcactgaaccgagcgaaggcagcgcacctggcactagcgagtctgcgactccggagagcggtccgggtacgagcacggaaccaagcgaaggcagcgccccaggtacctctgaatctgctaccccagaatctggcccgggttccgagccagctacctctggttctgaaaccccaggtacttccactgaaccaagcgaaggtagcgctcctggcacttctactgaaccatccgaaggttccgctcctggtacgtctgaaagcgctacccctgaaagcggcccaggcacctctgaaagcgctactcctgagagcggtccaggctctccagcaggttctccaacctccactgaagaaggcacctctgagtctgctacccctgaatctggtcctggctccgaacctgctacctctggttccgaaactccaggtacctcggaatctgcgactccggaatctggcccgggcacgagcacggagccgtctgagggtagcgcaccaggtaccagcactgagccttctgagggctctgcaccgggtacctccacggaaccttcggaaggttctgcgccgggtacctccactgagccatccgagggttcagcaccaggtactagcacggaaccgtccgagggctctgcaccaggtacgagcaccgaaccgtcggagggtagcgctccaggtagcccagcgggctctccgacaagcaccgaagaaggcaccagcaccgagccgtccgaaggttccgcaccaggtacaagcgagagcgcgactcctgaatctggtccgggtagcgagcctgcaaccagcggttctgagacgccgggcacttccgaatctgcgaccccggagtccggtccaggttcagagccggcgacgagcggttcggaaacgccgggtacgtctgaatcagccacgccggagtctggtccgggtacctcgaccgaaccaagcgaaggttcggcaccgggtactagcgagagcgcaacccctgaaagcggtccgggcagcccggcaggttctccaaccagcaccgaagaaggttcccctgctggtagcccgacctctacggaggaaggtagccctgcaggttccccaacttctactgaggaaggtacttctgagtccgctaccccagaaagcggtcctggtacctccactgaaccgtctgaaggctctgcaccaggcacttctgagtctgctactccagaaagcggcccaggttctgaaccagcaacttctggctctgagactccaggcacttctgagtccgcaacgcctgaatccggtcctggttctgaaccagctacttccggcagcgaaaccccaggtacctctgagtctgcgactccagagtctggtcctggtacttccactgagcctagcgagggttccgcaccaggttctccggctggtagcccgaccagcacggaggagggtacgtctgaatctgcaacgccggaatcgggcccaggttcggagcctgcaacgtctggcagcgaaaccccgggtacctccgaatctgctacaccggaaagcggtcctggcagccctgctggttctccaacctctaccgaggagggttcaccggcaggtagcccgactagcactgaagaaggtactagcacggagccgagcgagggtagtgctccgggtacgagcgagagcgcaacgccagagagcggtccaggcaccagcgaatcggccacccctgagagcggcccaggtacttctgagagcgccactcctgaatccggccctggtagcgagccggcaacctccggctcagaaactcctggttcggaaccagcgaccagcggttctgaaactccgggtagcccggcaggcagcccaacgagcaccgaagagggtaccagcacggaaccgagcgagggttctgccccgggtacttccaccgaaccatcggagggctctgcacctggtagcgaacctgcgacgtctggttctgaaacgccgggtaccagcgaaagcgctaccccagaatccggtccgggcactagcaccgagccatcggagggcgccgcagaaccagaggcg

SEQ ID NO: 955 - DNA, 5229 bp, Artificial Sequence
  Description of Artificial Sequence: Synthetic polynucleotide
caccatcatcaccatcactccccagcaggcagcccgaccagcaccgaggagggtacgagcgagtcggctactccagagagcggtccgggtacctctacggaaccgtccgaaggtagcgctccaggcacgtctgaaagcgcgacgccggaaagcggtccaggcagcgagccggcgacctccggtagcgaaacgcctggtacctcggagtcagcgactccggaaagcggtccgggtagcgaacctgcaacgagcggtagcgagactccaggcactagcgaatccgcaactccggagtcgggtccgggcacctctacggagcctagcgagggctcagcaccaggtagccctgcaggttccccgacgtcaaccgaggaaggtacaagcgaaagcgccacccctgagtcgggccctggcagcgaaccggcaactagcggcagcgagactccgggtaccagcgagtctgctacgccagagagcggcccaggttcgccagcgggttcgccgactagcacggaggagggcagcccagcgggtagcccgaccagcactgaggagggtacgtccaccgaaccgagcgaaggtagcgcaccaggtacctccgagtctgccacccctgaatccggtccaggtaccagcgaatcagccaccccggagtcgggtccaggtacgagcgaatctgctaccccggaatccggcccaggcagcgaacctgctactagcggcagcgaaacgccgggcagcgaacctgccacgtcaggcagcgagacgccgggttcccctgcaggctccccgaccagcactgaggagggcacctccaccgaaccatcagaaggtagcgcgcctggtacgtcaaccgaaccttccgagggcagcgcaccgggtggctcagcgcctgaggcaggtcgttctgctaaccatacccctgcaggattaactggccccgccaccagcgggagcgagacccccgggactgacatccaaatgacccagagcccgagcagcctgagcgcgagcgtgggcgaccgtgttaccatcacctgccaagcgagccaagacatcagcaactacctgaactggtatcagcaaaagccgggcaaagcgccgaagctgctgatctacgacgcgagcaacctggaaaccggtgtgccgagccgtttcagcggtagcggtagcggtaccgatttcacctttaccatcagccgtctgcaaccggaggacatcgcgacctatttctgccagcactttgatcacctgccgctggcgtttggtggcggtaccaaagttgagattaaaggtgcaacgcctccggagactggtgctgaaactgagtccccgggcgagacgaccggtggctctgctgaatccgaaccaccgggcgaaggccaggtgcaactgcaggaaagcggtccgggcgccgttaaaccgagccagaccctgagcctgacctgcaccgtgagcggcggtagcgttagcagcggtgactactattggacctggatccgtcaacgtccgggtaaaggcctggagtggatcggtcacatttactatagcggcaacaccaactacaacccgagcctgaagagccgtctgaccatcagcattgacaccagcaaaacccagttcagcctgaaactgagcagcgtgaccgcggcggataccgcgacctactattgcgttcgtgatcgtgttaccggcgcgttcgacatctggggtcagggcaccacagttaccgttagcagcggtggtggcggcagcgagttagttgtgacccaagagccgagcctgaccgttagcccgggtggtacggtcaccctgacgtgccgtagcagcaccggtgcggtcacgaccagcaactatgccaattgggtccagcagaaaccgggtcaagcaccgcgtggcctgatcggcggcaccaataaacgtgccccgggtactcctgcgcgtttctccggtagcagtctgggcggcagtgccgctctgaccctgagcggtgtccagccggaagatgaagcggagtactactgcgcgctgtggtattccaatctgtgggtttttggcggcggtaccaagctgaccgtattgggtgctacgccaccggagactggcgcagaaacggaaagcccgggtgagactacgggtggctctgcggagagcgaacctccgggtgagggtgaggtccaactgcaggagtctggtggtggcctggttcaaccgggtggctcgttgaagctgagctgtgcagctagcggctttaccttcaacacctatgcgatgaattgggttcgtcaggcaccgggtaagggcctggaatgggtggcgcgtatccgctccaagtacaacaactacgcgacctactacgcggatagcgttaaagaccgcttcacgattagccgtgacgattccaagaatacggcatatctgcaaatgaacaatctgaaaaccgaagataccgcggtgtattactgtgtgcgccacggcaatttcggcaacagctacgtgagctggtttgcatattggggtcagggcaccctggttacggtgagctccgggactgctgaggcggctagcgcctccggagaagctggaagaagcgccaatcacacaccagctggacttacaggcccgcctggtagccccgcggggagccctacaagcactgaggagggcacatctgagtccgctacccctgagagtggacccgggacaagcactgagcctagcgaaggaagcgcaccaggttcccccgctgggagccccacaagcacagaagagggaacttctaccgagccctctgagggctcagcccctggaactagcacagagccctccgaaggcagtgcaccgggtacttccgaaagcgcaactccggaatccggccctggttctgagcctgctacttccggctctgaaactccaggtagcgagccagcgacttctggttctgaaactccaggttcaccggcgggtagcccgacgagcacggaggaaggtacctctgagtcggccactcctgagtccggtccgggcacgagcaccgagccgagcgagggttcagccccgggtaccagcacggagccgtccgagggtagcgcaccgggttctccggcgggctcccctacgtctacggaagagggtacgtccactgaacctagcgagggcagcgcgccaggcaccagcactgaaccgagcgaaggcagcgcacctggcactagcgagtctgcgactccggagagcggtccgggtacgagcacggaaccaagcgaaggcagcgccccaggtacctctgaatctgctaccccagaatctggcccgggttccgagccagctacctctggttctgaaaccccaggtacttccactgaaccaagcgaaggtagcgctcctggcacttctactgaaccatccgaaggttccgctcctggtacgtctgaaagcgctacccctgaaagcggcccaggcacctctgaaagcgctactcctgagagcggtccaggctctccagcaggttctccaacctccactgaagaaggcacctctgagtctgctacccctgaatctggtcctggctccgaacctgctacctctggttccgaaactccaggtacctcggaatctgcgactccggaatctggcccgggcacgagcacggagccgtctgagggtagcgcaccaggtaccagcactgagccttctgagggctctgcaccgggtacctccacggaaccttcggaaggttctgcgccgggtacctccactgagccatccgagggttcagcaccaggtactagcacggaaccgtccgagggctctgcaccaggtacgagcaccgaaccgtcggagggtagcgctccaggtagcccagcgggctctccgacaagcaccgaagaaggcaccagcaccgagccgtccgaaggttccgcaccaggtacaagcgagagcgcgactcctgaatctggtccgggtagcgagcctgcaaccagcggttctgagacgccgggcacttccgaatctgcgaccccggagtccggtccaggttcagagccggcgacgagcggttcggaaacgccgggtacgtctgaatcagccacgccggagtctggtccgggtacctcgaccgaaccaagcgaaggttcggcaccgggtactagcgagagcgcaacccctgaaagcggtccgggcagcccggcaggttctccaaccagcaccgaagaaggttcccctgctggtagcccgacctctacggaggaaggtagccctgcaggttccccaacttctactgaggaaggtacttctgagtccgctaccccagaaagcggtcctggtacctccactgaaccgtctgaaggctctgcaccaggcacttctgagtctgctactccagaaagcggcccaggttctgaaccagcaacttctggctctgagactccaggcacttctgagtccgcaacgcctgaatccggtcctggttctgaaccagctacttccggcagcgaaaccccaggtacctctgagtctgcgactccagagtctggtcctggtacttccactgagcctagcgagggttccgcaccaggttctccggctggtagcccgaccagcacggaggagggtacgtctgaatctgcaacgccggaatcgggcccaggttcggagcctgcaacgtctggcagcgaaaccccgggtacctccgaatctgctacaccggaaagcggtcctggcagccctgctggttctccaacctctaccgaggagggttcaccggcaggtagcccgactagcactgaagaaggtactagcacggagccgagcgagggtagtgctccgggtacgagcgagagcgcaacgccagagagcggtccaggcaccagcgaatcggccacccctgagagcggcccaggtacttctgagagcgccactcctgaatccggccctggtagcgagccggcaacctccggctcagaaactcctggttcggaaccagcgaccagcggttctgaaactccgggtagcccggcaggcagcccaacgagcaccgaagagggtaccagcacggaaccgagcgagggttctgccccgggtacttccaccgaaccatcggagggctctgcacctggtagcgaacctgcgacgtctggttctgaaacgccgggtaccagcgaaagcgctaccccagaatccggtccgggcactagcaccgagccatcggagggcgccgcagaaccagaggcg

SEQ ID NO: 956 - DNA, 5229 bp, Artificial Sequence
  Description of Artificial Sequence: Synthetic polynucleotide
caccatcatcaccatcactccccagcaggcagcccgaccagcaccgaggagggtacgagcgagtcggctactccagagagcggtccgggtacctctacggaaccgtccgaaggtagcgctccaggcacgtctgaaagcgcgacgccggaaagcggtccaggcagcgagccggcgacctccggtagcgaaacgcctggtacctcggagtcagcgactccggaaagcggtccgggtagcgaacctgcaacgagcggtagcgagactccaggcactagcgaatccgcaactccggagtcgggtccgggcacctctacggagcctagcgagggctcagcaccaggtagccctgcaggttccccgacgtcaaccgaggaaggtacaagcgaaagcgccacccctgagtcgggccctggcagcgaaccggcaactagcggcagcgagactccgggtaccagcgagtctgctacgccagagagcggcccaggttcgccagcgggttcgccgactagcacggaggagggcagcccagcgggtagcccgaccagcactgaggagggtacgtccaccgaaccgagcgaaggtagcgcaccaggtacctccgagtctgccacccctgaatccggtccaggtaccagcgaatcagccaccccggagtcgggtccaggtacgagcgaatctgctaccccggaatccggcccaggcagcgaacctgctactagcggcagcgaaacgccgggcagcgaacctgccacgtcaggcagcgagacgccgggttcccctgcaggctccccgaccagcactgaggagggcacctccaccgaaccatcagaaggtagcgcgcctggtacgtcaaccgaaccttccgagggcagcgcaccgggtggctcagcgcctgaggcaggtcgttctgctaaccatacccctgcaggattaactggccccgccaccagcgggagcgagacccccgggactgatatccagatgacccaaagccctagttcattaagcgcatcggtgggtgaccgggtaaccattacctgtcaagcaagtcaggatatcagcaactacctgaactggtaccagcagaaacccggaaaagcgccgaaactgctgatctatgatgccagcaatctggaaacaggtgttcctagccgtttctctggatcaggttcaggaaccgattttacattcaccattagccgtttacagccggaggataccgcgacgtatttttgccagcacttcgatcatctgcctttagcatttggcggcggtactaaagtggagatcaaaggagcgacgccgcctgagactggagcagagaccgaatcacctggtgagacgacgggcgggtcagccgaaagcgagccaccgggggaagggcaggttcaattgcaagaaagtggaccgggcgccgtcaaacccagcgaaaccctctccctgacctgcacagtcagcggagggtctgtgagctcaggcgactactattggacctggattagacaatcaccaggtaaaggtcttgagtggattggccacatctactatagcggtaacaccaactataatccgagcctgaaaagtcgtctgaccatcagcatcgacaccagcaaaacccagtttagcctgaaattaagcagcgttacagcagcggatacagcgacctactattgtgtccgtgatcgcgttactggcgcatttgatatttgggggcagggaacagcagttactgtgtcaagcggaggaggtggcagtgaactggttgttacacaagaaccgtccttaacagttagtccggggggcaccgtcacattaacatgtcgttcaagtacaggtgcagtaaccacgtccaactatgcaaattgggttcaacagaagcccggacaggccccgagaggtttaataggtggaacaaacaaaagagcacctggtacacctgcccggttctccggatcctctctcggcggttccgcagcattaaccttaagtggtgttcagccggaagatgaagcggagtattactgcgcactttggtatagcaacttatgggtgtttggaggcggtacaaaattgaccgttctgggtgcgacgccgcccgaaacgggcgcggagacggagtccccaggtgaaaccactggtggaagcgcagaatcagagccaccgggcgagggggaagtacaattacaggagtccggcggaggtctggttcagcctggtggtagcctcaaactgtcctgcgcagcaagcggttttacctttaacacctacgccatgaactgggtgcgtcaagctcctggtaaaggcttagaatgggttgcgcgtattcgtagcaaatacaacaactatgccacctattacgcggacagtgtaaaagaccgtttcaccatcagccgcgatgatagcaaaaatacagcctatctgcagatgaacaacctgaagaccgaagacacggccgtctactactgcgtgcgtcatggcaattttggcaacagctatgttagctggttcgcgtattggggccagggaacactggtcacggtttcctcagggactgctgaggcggctagcgcctccggagaagctggaagaagcgccaatcacacaccagctggacttacaggcccgcctggtagccccgcggggagccctacaagcactgaggagggcacatctgagtccgctacccctgagagtggacccgggacaagcactgagcctagcgaaggaagcgcaccaggttcccccgctgggagccccacaagcacagaagagggaacttctaccgagccctctgagggctcagcccctggaactagcacagagccctccgaaggcagtgcaccgggtacttccgaaagcgcaactccggaatccggccctggttctgagcctgctacttccggctctgaaactccaggtagcgagccagcgacttctggttctgaaactccaggttcaccggcgggtagcccgacgagcacggaggaaggtacctctgagtcggccactcctgagtccggtccgggcacgagcaccgagccgagcgagggttcagccccgggtaccagcacggagccgtccgagggtagcgcaccgggttctccggcgggctcccctacgtctacggaagagggtacgtccactgaacctagcgagggcagcgcgccaggcaccagcactgaaccgagcgaaggcagcgcacctggcactagcgagtctgcgactccggagagcggtccgggtacgagcacggaaccaagcgaaggcagcgccccaggtacctctgaatctgctaccccagaatctggcccgggttccgagccagctacctctggttctgaaaccccaggtacttccactgaaccaagcgaaggtagcgctcctggcacttctactgaaccatccgaaggttccgctcctggtacgtctgaaagcgctacccctgaaagcggcccaggcacctctgaaagcgctactcctgagagcggtccaggctctccagcaggttctccaacctccactgaagaaggcacctctgagtctgctacccctgaatctggtcctggctccgaacctgctacctctggttccgaaactccaggtacctcggaatctgcgactccggaatctggcccgggcacgagcacggagccgtctgagggtagcgcaccaggtaccagcactgagccttctgagggctctgcaccgggtacctccacggaaccttcggaaggttctgcgccgggtacctccactgagccatccgagggttcagcaccaggtactagcacggaaccgtccgagggctctgcaccaggtacgagcaccgaaccgtcggagggtagcgctccaggtagcccagcgggctctccgacaagcaccgaagaaggcaccagcaccgagccgtccgaaggttccgcaccaggtacaagcgagagcgcgactcctgaatctggtccgggtagcgagcctgcaaccagcggttctgagacgccgggcacttccgaatctgcgaccccggagtccggtccaggttcagagccggcgacgagcggttcggaaacgccgggtacgtctgaatcagccacgccggagtctggtccgggtacctcgaccgaaccaagcgaaggttcggcaccgggtactagcgagagcgcaacccctgaaagcggtccgggcagcccggcaggttctccaaccagcaccgaagaaggttcccctgctggtagcccgacctctacggaggaaggtagccctgcaggttccccaacttctactgaggaaggtacttctgagtccgctaccccagaaagcggtcctggtacctccactgaaccgtctgaaggctctgcaccaggcacttctgagtctgctactccagaaagcggcccaggttctgaaccagcaacttctggctctgagactccaggcacttctgagtccgcaacgcctgaatccggtcctggttctgaaccagctacttccggcagcgaaaccccaggtacctctgagtctgcgactccagagtctggtcctggtacttccactgagcctagcgagggttccgcaccaggttctccggctggtagcccgaccagcacggaggagggtacgtctgaatctgcaacgccggaatcgggcccaggttcggagcctgcaacgtctggcagcgaaaccccgggtacctccgaatctgctacaccggaaagcggtcctggcagccctgctggttctccaacctctaccgaggagggttcaccggcaggtagcccgactagcactgaagaaggtactagcacggagccgagcgagggtagtgctccgggtacgagcgagagcgcaacgccagagagcggtccaggcaccagcgaatcggccacccctgagagcggcccaggtacttctgagagcgccactcctgaatccggccctggtagcgagccggcaacctccggctcagaaactcctggttcggaaccagcgaccagcggttctgaaactccgggtagcccggcaggcagcccaacgagcaccgaagagggtaccagcacggaaccgagcgagggttctgccccgggtacttccaccgaaccatcggagggctctgcacctggtagcgaacctgcgacgtctggttctgaaacgccgggtaccagcgaaagcgctaccccagaatccggtccgggcactagcaccgagccatcggagggcgccgcagaaccagaggcg

SEQ ID NO: 957 - DNA, 5229 bp, Artificial Sequence
  Description of Artificial Sequence: Synthetic polynucleotide
caccatcatcaccatcactccccagcaggcagcccgaccagcaccgaggagggtacgagcgagtcggctactccagagagcggtccgggtacctctacggaaccgtccgaaggtagcgctccaggcacgtctgaaagcgcgacgccggaaagcggtccaggcagcgagccggcgacctccggtagcgaaacgcctggtacctcggagtcagcgactccggaaagcggtccgggtagcgaacctgcaacgagcggtagcgagactccaggcactagcgaatccgcaactccggagtcgggtccgggcacctctacggagcctagcgagggctcagcaccaggtagccctgcaggttccccgacgtcaaccgaggaaggtacaagcgaaagcgccacccctgagtcgggccctggcagcgaaccggcaactagcggcagcgagactccgggtaccagcgagtctgctacgccagagagcggcccaggttcgccagcgggttcgccgactagcacggaggagggcagcccagcgggtagcccgaccagcactgaggagggtacgtccaccgaaccgagcgaaggtagcgcaccaggtacctccgagtctgccacccctgaatccggtccaggtaccagcgaatcagccaccccggagtcgggtccaggtacgagcgaatctgctaccccggaatccggcccaggcagcgaacctgctactagcggcagcgaaacgccgggcagcgaacctgccacgtcaggcagcgagacgccgggttcccctgcaggctccccgaccagcactgaggagggcacctccaccgaaccatcagaaggtagcgcgcctggtacgtcaaccgaaccttccgagggcagcgcaccgggtggctcagcgcctgaggcaggtcgttctgctaaccatacccctgcaggattaactggccccgccaccagcgggagcgagacccccgggactgatatccagatgacccaaagccctagttcattaagcgcatcggtgggtgaccgggtaaccattacctgtcaagcaagtcaggatatcagcaactacctgaactggtaccagcagaaacccggaaaagcgccgaaactgctgatctatgatgccagcaatctggaaacaggtgttcctagccgtttctctggatcaggttcaggaaccgattttacattcaccattagccgtttacagccggaggataccgcgacgtatttttgccagcacttcgatcatctgcctttagcatttggcggcggtactaaagtggagatcaaaggagcgacgccgcctgagactggagcagagaccgaatcacctggtgagacgacgggcgggtcagccgaaagcgagccaccgggggaagggcaggttcaattgcaagaaagtggaccgggcgccgtcaaacccagcgaaaccctctccctgacctgcacagtcagcggagggtctgtgagctcaggcgactactattggacctggattagacaatcaccaggtaaaggtcttgagtggattggccacatctactatagcggtaacaccaactataatccgagcctgaaaagtcgtctgaccatcagcatcgacaccagcaaaacccagtttagcctgaaattaagcagcgttacagcagcggatacagcgacctactattgtgtccgtgatcgcgttactggcgcatttgatatttgggggcagggaacaacagttactgtgtcaagtggaggaggtggcagtgaactggttgttacacaagaaccgtccttaacagttagtccggggggcaccgtcacattaacatgtcgttcaagtacaggtgcagtaaccacgtccaactatgcaaattgggttcaacagaagcccggacaggccccgagaggtttaataggtggaacaaacaaaagagcacctggtacacctgcccggttctccggatcctctctcggcggttccgcagcattaaccttaagtggtgttcagccggaagatgaagcggagtattactgcgcactttggtatagcaacttatgggtgtttggaggcggtacaaaattgaccgttctgggtgcgacgccgcccgaaacgggcgcggagacggagtccccaggtgaaaccactggtggaagcgcagaatcagagccaccgggcgagggggaagtacaattacaggagtccggcggaggtctggttcagcctggtggtagcctcaaactgtcctgcgcagcaagcggttttacctttaacacctacgccatgaactgggtgcgtcaagctcctggtaaaggcttagaatgggttgcgcgtattcgtagcaaatacaacaactatgccacctattacgcggacagtgtaaaagaccgtttcaccatcagccgcgatgatagcaaaaatacagcctatctgcagatgaacaacctgaagaccgaagacacggccgtctactactgcgtgcgtcatggcaattttggcaacagctatgttagctggttcgcgtattggggccagggaacactggtcacggtttcctcagggactgctgaggcggctagcgcctccggagaagctggaagaagcgccaatcacacaccagctggacttacaggcccgcctggtagccccgcggggagccctacaagcactgaggagggcacatctgagtccgctacccctgagagtggacccgggacaagcactgagcctagcgaaggaagcgcaccaggttcccccgctgggagccccacaagcacagaagagggaacttctaccgagccctctgagggctcagcccctggaactagcacagagccctccgaaggcagtgcaccgggtacttccgaaagcgcaactccggaatccggccctggttctgagcctgctacttccggctctgaaactccaggtagcgagccagcgacttctggttctgaaactccaggttcaccggcgggtagcccgacgagcacggaggaaggtacctctgagtcggccactcctgagtccggtccgggcacgagcaccgagccgagcgagggttcagccccgggtaccagcacggagccgtccgagggtagcgcaccgggttctccggcgggctcccctacgtctacggaagagggtacgtccactgaacctagcgagggcagcgcgccaggcaccagcactgaaccgagcgaaggcagcgcacctggcactagcgagtctgcgactccggagagcggtccgggtacgagcacggaaccaagcgaaggcagcgccccaggtacctctgaatctgctaccccagaatctggcccgggttccgagccagctacctctggttctgaaaccccaggtacttccactgaaccaagcgaaggtagcgctcctggcacttctactgaaccatccgaaggttccgctcctggtacgtctgaaagcgctacccctgaaagcggcccaggcacctctgaaagcgctactcctgagagcggtccaggctctccagcaggttctccaacctccactgaagaaggcacctctgagtctgctacccctgaatctggtcctggctccgaacctgctacctctggttccgaaactccaggtacctcggaatctgcgactccggaatctggcccgggcacgagcacggagccgtctgagggtagcgcaccaggtaccagcactgagccttctgagggctctgcaccgggtacctccacggaaccttcggaaggttctgcgccgggtacctccactgagccatccgagggttcagcaccaggtactagcacggaaccgtccgagggctctgcaccaggtacgagcaccgaaccgtcggagggtagcgctccaggtagcccagcgggctctccgacaagcaccgaagaaggcaccagcaccgagccgtccgaaggttccgcaccaggtacaagcgagagcgcgactcctgaatctggtccgggtagcgagcctgcaaccagcggttctgagacgccgggcacttccgaatctgcgaccccggagtccggtccaggttcagagccggcgacgagcggttcggaaacgccgggtacgtctgaatcagccacgccggagtctggtccgggtacctcgaccgaaccaagcgaaggttcggcaccgggtactagcgagagcgcaacccctgaaagcggtccgggcagcccggcaggttctccaaccagcaccgaagaaggttcccctgctggtagcccgacctctacggaggaaggtagccctgcaggttccccaacttctactgaggaaggtacttctgagtccgctaccccagaaagcggtcctggtacctccactgaaccgtctgaaggctctgcaccaggcacttctgagtctgctactccagaaagcggcccaggttctgaaccagcaacttctggctctgagactccaggcacttctgagtccgcaacgcctgaatccggtcctggttctgaaccagctacttccggcagcgaaaccccaggtacctctgagtctgcgactccagagtctggtcctggtacttccactgagcctagcgagggttccgcaccaggttctccggctggtagcccgaccagcacggaggagggtacgtctgaatctgcaacgccggaatcgggcccaggttcggagcctgcaacgtctggcagcgaaaccccgggtacctccgaatctgctacaccggaaagcggtcctggcagccctgctggttctccaacctctaccgaggagggttcaccggcaggtagcccgactagcactgaagaaggtactagcacggagccgagcgagggtagtgctccgggtacgagcgagagcgcaacgccagagagcggtccaggcaccagcgaatcggccacccctgagagcggcccaggtacttctgagagcgccactcctgaatccggccctggtagcgagccggcaacctccggctcagaaactcctggttcggaaccagcgaccagcggttctgaaactccgggtagcccggcaggcagcccaacgagcaccgaagagggtaccagcacggaaccgagcgagggttctgccccgggtacttccaccgaaccatcggagggctctgcacctggtagcgaacctgcgacgtctggttctgaaacgccgggtaccagcgaaagcgctaccccagaatccggtccgggcactagcaccgagccatcggagggcgccgcagaaccagaggcg

SEQ ID NO: 958 - DNA, 5229 bp, Artificial Sequence
  Description of Artificial Sequence: Synthetic polynucleotide
caccatcatcaccatcactccccagcaggcagcccgaccagcaccgaggagggtacgagcgagtcggctactccagagagcggtccgggtacctctacggaaccgtccgaaggtagcgctccaggcacgtctgaaagcgcgacgccggaaagcggtccaggcagcgagccggcgacctccggtagcgaaacgcctggtacctcggagtcagcgactccggaaagcggtccgggtagcgaacctgcaacgagcggtagcgagactccaggcactagcgaatccgcaactccggagtcgggtccgggcacctctacggagcctagcgagggctcagcaccaggtagccctgcaggttccccgacgtcaaccgaggaaggtacaagcgaaagcgccacccctgagtcgggccctggcagcgaaccggcaactagcggcagcgagactccgggtaccagcgagtctgctacgccagagagcggcccaggttcgccagcgggttcgccgactagcacggaggagggcagcccagcgggtagcccgaccagcactgaggagggtacgtccaccgaaccgagcgaaggtagcgcaccaggtacctccgagtctgccacccctgaatccggtccaggtaccagcgaatcagccaccccggagtcgggtccaggtacgagcgaatctgctaccccggaatccggcccaggcagcgaacctgctactagcggcagcgaaacgccgggcagcgaacctgccacgtcaggcagcgagacgccgggttcccctgcaggctccccgaccagcactgaggagggcacctccaccgaaccatcagaaggtagcgcgcctggtacgtcaaccgaaccttccgagggcagcgcaccgggtggctcagcgcctgaggcaggtcgttctgctaaccatacccctgcaggattaactggccccgccaccagcgggagcgagacccccgggactgatatccagatgacccaaagccctagttcattaagcgcatcggtgggtgaccgggtaaccattacctgtcaagcaagtcaggatatcagcaactacctgaactggtaccagcagaaacccggaaaagcgccgaaactgctgatctatgatgccagcaatctggaaacaggtgttcctagccgtttctctggatcaggttcaggaaccgattttacattcaccattagccgtttacagccggaggataccgcgacgtatttttgccagcacttcgatcatctgcctttagcatttggcggcggtactaaagtggagatcaaaggagcgacgccgcctgagactggagcagagaccgaatcacctggtgagacgacgggcgggtcagccgaaagcgagccaccgggggaagggcaggttcaattgcaagaaagtggaccgggcttagtcaaacccagccagaccctctccctgacctgcacagtcagcggagggtctgtgagctcaggcgactactattggacctggattagacaacgtccaggtaaaggtcttgagtggattggccacatctactatagcggtaacaccaactataatccgagcctgaaaagtcgtctgaccatcagcatcgacaccagcaaaacccagtttagcctgaaattaagcagcgttacagcagcggatacagcgatttactattgtgtccgtgatcgcgttactggcgcatttgatatttgggggcagggaacaatggttactgtgtcaagtggaggaggtggcagtgaactggttgttacacaagaaccgtccttaacagttagtccggggggcaccgtcacattaacatgtcgttcaagtacaggtgcagtaaccacgtccaactatgcaaattgggttcaacagaagcccggacaggccccgagaggtttaataggtggaacaaacaaaagagcacctggtacacctgcccggttctccggatcctctctcggcggttccgcagcattaaccttaagtggtgttcagccggaagatgaagcggagtattactgcgcactttggtatagcaacttatgggtgtttggaggcggtacaaaattgaccgttctgggtgcgacgccgcccgaaacgggcgcggagacggagtccccaggtgaaaccactggtggaagcgcagaatcagagccaccgggcgagggggaagtacaattacaggagtccggcggaggtctggttcagcctggtggtagcctcaaactgtcctgcgcagcaagcggttttacctttaacacctacgccatgaactgggtgcgtcaagctcctggtaaaggcttagaatgggttgcgcgtattcgtagcaaatacaacaactatgccacctattacgcggacagtgtaaaagaccgtttcaccatcagccgcgatgatagcaaaaatacagcctatctgcagatgaacaacctgaagaccgaagacacggccgtctactactgcgtgcgtcatggcaattttggcaacagctatgttagctggttcgcgtattggggccagggaacactggtcacggtttcctcagggactgctgaggcggctagcgcctccggagaagctggaagaagcgccaatcacacaccagctggacttacaggcccgcctggtagccccgcggggagccctacaagcactgaggagggcacatctgagtccgctacccctgagagtggacccgggacaagcactgagcctagcgaaggaagcgcaccaggttcccccgctgggagccccacaagcacagaagagggaacttctaccgagccctctgagggctcagcccctggaactagcacagagccctccgaaggcagtgcaccgggtacttccgaaagcgcaactccggaatccggccctggttctgagcctgctacttccggctctgaaactccaggtagcgagccagcgacttctggttctgaaactccaggttcaccggcgggtagcccgacgagcacggaggaaggtacctctgagtcggccactcctgagtccggtccgggcacgagcaccgagccgagcgagggttcagccccgggtaccagcacggagccgtccgagggtagcgcaccgggttctccggcgggctcccctacgtctacggaagagggtacgtccactgaacctagcgagggcagcgcgccaggcaccagcactgaaccgagcgaaggcagcgcacctggcactagcgagtctgcgactccggagagcggtccgggtacgagcacggaaccaagcgaaggcagcgccccaggtacctctgaatctgctaccccagaatctggcccgggttccgagccagctacctctggttctgaaaccccaggtacttccactgaaccaagcgaaggtagcgctcctggcacttctactgaaccatccgaaggttccgctcctggtacgtctgaaagcgctacccctgaaagcggcccaggcacctctgaaagcgctactcctgagagcggtccaggctctccagcaggttctccaacctccactgaagaaggcacctctgagtctgctacccctgaatctggtcctggctccgaacctgctacctctggttccgaaactccaggtacctcggaatctgcgactccggaatctggcccgggcacgagcacggagccgtctgagggtagcgcaccaggtaccagcactgagccttctgagggctctgcaccgggtacctccacggaaccttcggaaggttctgcgccgggtacctccactgagccatccgagggttcagcaccaggtactagcacggaaccgtccgagggctctgcaccaggtacgagcaccgaaccgtcggagggtagcgctccaggtagcccagcgggctctccgacaagcaccgaagaaggcaccagcaccgagccgtccgaaggttccgcaccaggtacaagcgagagcgcgactcctgaatctggtccgggtagcgagcctgcaaccagcggttctgagacgccgggcacttccgaatctgcgaccccggagtccggtccaggttcagagccggcgacgagcggttcggaaacgccgggtacgtctgaatcagccacgccggagtctggtccgggtacctcgaccgaaccaagcgaaggttcggcaccgggtactagcgagagcgcaacccctgaaagcggtccgggcagcccggcaggttctccaaccagcaccgaagaaggttcccctgctggtagcccgacctctacggaggaaggtagccctgcaggttccccaacttctactgaggaaggtacttctgagtccgctaccccagaaagcggtcctggtacctccactgaaccgtctgaaggctctgcaccaggcacttctgagtctgctactccagaaagcggcccaggttctgaaccagcaacttctggctctgagactccaggcacttctgagtccgcaacgcctgaatccggtcctggttctgaaccagctacttccggcagcgaaaccccaggtacctctgagtctgcgactccagagtctggtcctggtacttccactgagcctagcgagggttccgcaccaggttctccggctggtagcccgaccagcacggaggagggtacgtctgaatctgcaacgccggaatcgggcccaggttcggagcctgcaacgtctggcagcgaaaccccgggtacctccgaatctgctacaccggaaagcggtcctggcagccctgctggttctccaacctctaccgaggagggttcaccggcaggtagcccgactagcactgaagaaggtactagcacggagccgagcgagggtagtgctccgggtacgagcgagagcgcaacgccagagagcggtccaggcaccagcgaatcggccacccctgagagcggcccaggtacttctgagagcgccactcctgaatccggccctggtagcgagccggcaacctccggctcagaaactcctggttcggaaccagcgaccagcggttctgaaactccgggtagcccggcaggcagcccaacgagcaccgaagagggtaccagcacggaaccgagcgagggttctgccccgggtacttccaccgaaccatcggagggctctgcacctggtagcgaacctgcgacgtctggttctgaaacgccgggtaccagcgaaagcgctaccccagaatccggtccgggcactagcaccgagccatcggagggcgccgcagaaccagaggcg

SEQ ID NO: 959 - DNA, 5229 bp, Artificial Sequence
  Description of Artificial Sequence: Synthetic polynucleotide
caccatcatcaccatcactccccagcaggcagcccgaccagcaccgaggagggtacgagcgagtcggctactccagagagcggtccgggtacctctacggaaccgtccgaaggtagcgctccaggcacgtctgaaagcgcgacgccggaaagcggtccaggcagcgagccggcgacctccggtagcgaaacgcctggtacctcggagtcagcgactccggaaagcggtccgggtagcgaacctgcaacgagcggtagcgagactccaggcactagcgaatccgcaactccggagtcgggtccgggcacctctacggagcctagcgagggctcagcaccaggtagccctgcaggttccccgacgtcaaccgaggaaggtacaagcgaaagcgccacccctgagtcgggccctggcagcgaaccggcaactagcggcagcgagactccgggtaccagcgagtctgctacgccagagagcggcccaggttcgccagcgggttcgccgactagcacggaggagggcagcccagcgggtagcccgaccagcactgaggagggtacgtccaccgaaccgagcgaaggtagcgcaccaggtacctccgagtctgccacccctgaatccggtccaggtaccagcgaatcagccaccccggagtcgggtccaggtacgagcgaatctgctaccccggaatccggcccaggcagcgaacctgctactagcggcagcgaaacgccgggcagcgaacctgccacgtcaggcagcgagacgccgggttcccctgcaggctccccgaccagcactgaggagggcacctccaccgaaccatcagaaggtagcgcgcctggtacgtcaaccgaaccttccgagggcagcgcaccgggtggctcagcgcctgaggcaggtcgttctgctaaccatacccctgcaggattaactggccccgccaccagcgggagcgagacccccgggactgatatccagatgacccaaagccctagttcattaagcgcatcggtgggtgaccgggtaaccattacctgtcaagcaagtcaggatatcagcaactacctgaactggtaccagcagaaacccggaaaagcgccgaaactgctgatctatgatgccagcaatctggaaacaggtgttcctagccgtttctctggatcaggttcaggaaccgattttacattcaccattagccgtttacagccggaggataccgcgacgtatttttgccagcacttcgatcatctgcctttagcatttggcggcggtactaaagtggagatcaaaggagcgacgccgcctgagactggagcagagaccgaatcacctggtgagacgacgggcgggtcagccgaaagcgagccaccgggggaagggcaggttcaattgcaagaaagtggaccgggcgccgtcaaacccagccagaccctctccctgacctgcacagtcagcggagggtctgtgagctcaggcgactactattggacctggattagacaacgtccaggtaaaggtcttgagtggattggccacatctactatagcggtaacaccaactataatccgagcctgaaaagtcgtctgaccatcagcatcgacaccagcaaaacccagtttagcctgaaattaagcagcgttacagcagcggatacagcgacctactattgtgtccgtgatcgcgttactggcgcatttgatatttgggggcagggaacagcagttactgtgtcaagtggaggaggtggcagtgaactggttgttacacaagaaccgtccttaacagttagtccggggggcaccgtcacattaacatgtcgttcaagtacaggtgcagtaaccacgtccaactatgcaaattgggttcaacagaagcccggacaggccccgagaggtttaataggtggaacaaacaaaagagcacctggtacacctgcccggttctccggatcctctctcggcggttccgcagcattaaccttaagtggtgttcagccggaagatgaagcggagtattactgcgcactttggtatagcaacttatgggtgtttggaggcggtacaaaattgaccgttctgggtgcgacgccgcccgaaacgggcgcggagacggagtccccaggtgaaaccactggtggaagcgcagaatcagagccaccgggcgagggggaagtacaattacaggagtccggcggaggtctggttcagcctggtggtagcctcaaactgtcctgcgcagcaagcggttttacctttaacacctacgccatgaactgggtgcgtcaagctcctggtaaaggcttagaatgggttgcgcgtattcgtagcaaatacaacaactatgccacctattacgcggacagtgtaaaagaccgtttcaccatcagccgcgatgatagcaaaaatacagcctatctgcagatgaacaacctgaagaccgaagacacggccgtctactactgcgtgcgtcatggcaattttggcaacagctatgttagctggttcgcgtattggggccagggaacactggtcacggtttcctcagggactgctgaggcggctagcgcctccggagaagctggaagaagcgccaatcacacaccagctggacttacaggcccgcctggtagccccgcggggagccctacaagcactgaggagggcacatctgagtccgctacccctgagagtggacccgggacaagcactgagcctagcgaaggaagcgcaccaggttcccccgctgggagccccacaagcacagaagagggaacttctaccgagccctctgagggctcagcccctggaactagcacagagccctccgaaggcagtgcaccgggtacttccgaaagcgcaactccggaatccggccctggttctgagcctgctacttccggctctgaaactccaggtagcgagccagcgacttctggttctgaaactccaggttcaccggcgggtagcccgacgagcacggaggaaggtacctctgagtcggccactcctgagtccggtccgggcacgagcaccgagccgagcgagggttcagccccgggtaccagcacggagccgtccgagggtagcgcaccgggttctccggcgggctcccctacgtctacggaagagggtacgtccactgaacctagcgagggcagcgcgccaggcaccagcactgaaccgagcgaaggcagcgcacctggcactagcgagtctgcgactccggagagcggtccgggtacgagcacggaaccaagcgaaggcagcgccccaggtacctctgaatctgctaccccagaatctggcccgggttccgagccagctacctctggttctgaaaccccaggtacttccactgaaccaagcgaaggtagcgctcctggcacttctactgaaccatccgaaggttccgctcctggtacgtctgaaagcgctacccctgaaagcggcccaggcacctctgaaagcgctactcctgagagcggtccaggctctccagcaggttctccaacctccactgaagaaggcacctctgagtctgctacccctgaatctggtcctggctccgaacctgctacctctggttccgaaactccaggtacctcggaatctgcgactccggaatctggcccgggcacgagcacggagccgtctgagggtagcgcaccaggtaccagcactgagccttctgagggctctgcaccgggtacctccacggaaccttcggaaggttctgcgccgggtacctccactgagccatccgagggttcagcaccaggtactagcacggaaccgtccgagggctctgcaccaggtacgagcaccgaaccgtcggagggtagcgctccaggtagcccagcgggctctccgacaagcaccgaagaaggcaccagcaccgagccgtccgaaggttccgcaccaggtacaagcgagagcgcgactcctgaatctggtccgggtagcgagcctgcaaccagcggttctgagacgccgggcacttccgaatctgcgaccccggagtccggtccaggttcagagccggcgacgagcggttcggaaacgccgggtacgtctgaatcagccacgccggagtctggtccgggtacctcgaccgaaccaagcgaaggttcggcaccgggtactagcgagagcgcaacccctgaaagcggtccgggcagcccggcaggttctccaaccagcaccgaagaaggttcccctgctggtagcccgacctctacggaggaaggtagccctgcaggttccccaacttctactgaggaaggtacttctgagtccgctaccccagaaagcggtcctggtacctccactgaaccgtctgaaggctctgcaccaggcacttctgagtctgctactccagaaagcggcccaggttctgaaccagcaacttctggctctgagactccaggcacttctgagtccgcaacgcctgaatccggtcctggttctgaaccagctacttccggcagcgaaaccccaggtacctctgagtctgcgactccagagtctggtcctggtacttccactgagcctagcgagggttccgcaccaggttctccggctggtagcccgaccagcacggaggagggtacgtctgaatctgcaacgccggaatcgggcccaggttcggagcctgcaacgtctggcagcgaaaccccgggtacctccgaatctgctacaccggaaagcggtcctggcagccctgctggttctccaacctctaccgaggagggttcaccggcaggtagcccgactagcactgaagaaggtactagcacggagccgagcgagggtagtgctccgggtacgagcgagagcgcaacgccagagagcggtccaggcaccagcgaatcggccacccctgagagcggcccaggtacttctgagagcgccactcctgaatccggccctggtagcgagccggcaacctccggctcagaaactcctggttcggaaccagcgaccagcggttctgaaactccgggtagcccggcaggcagcccaacgagcaccgaagagggtaccagcacggaaccgagcgagggttctgccccgggtacttccaccgaaccatcggagggctctgcacctggtagcgaacctgcgacgtctggttctgaaacgccgggtaccagcgaaagcgctaccccagaatccggtccgggcactagcaccgagccatcggagggcgccgcagaaccagaggcg

SEQ ID NO: 960 - DNA, 5229 bp, Artificial Sequence
  Description of Artificial Sequence: Synthetic polynucleotide
caccatcatcaccatcactccccagcaggcagcccgaccagcaccgaggagggtacgagcgagtcggctactccagagagcggtccgggtacctctacggaaccgtccgaaggtagcgctccaggcacgtctgaaagcgcgacgccggaaagcggtccaggcagcgagccggcgacctccggtagcgaaacgcctggtacctcggagtcagcgactccggaaagcggtccgggtagcgaacctgcaacgagcggtagcgagactccaggcactagcgaatccgcaactccggagtcgggtccgggcacctctacggagcctagcgagggctcagcaccaggtagccctgcaggttccccgacgtcaaccgaggaaggtacaagcgaaagcgccacccctgagtcgggccctggcagcgaaccggcaactagcggcagcgagactccgggtaccagcgagtctgctacgccagagagcggcccaggttcgccagcgggttcgccgactagcacggaggagggcagcccagcgggtagcccgaccagcactgaggagggtacgtccaccgaaccgagcgaaggtagcgcaccaggtacctccgagtctgccacccctgaatccggtccaggtaccagcgaatcagccaccccggagtcgggtccaggtacgagcgaatctgctaccccggaatccggcccaggcagcgaacctgctactagcggcagcgaaacgccgggcagcgaacctgccacgtcaggcagcgagacgccgggttcccctgcaggctccccgaccagcactgaggagggcacctccaccgaaccatcagaaggtagcgcgcctggtacgtcaaccgaaccttccgagggcagcgcaccgggtggctcagcgcctgaggcaggtcgttctgctaaccatacccctgcaggattaactggccccgccaccagcgggagcgagacccccgggactgatatccagatgacccaaagccctagttcattaagcgcatcggtgggtgaccgggtaaccattacctgtcaagcaagtcaggatatcagcaactacctgaactggtaccagcagaaacccggaaaagcgccgaaactgctgatctatgatgccagcaatctggaaacaggtgttcctagccgtttctctggatcaggttcaggaaccgattttacattcaccattagccgtttacagccggaggataccgcgacgtatttttgccagcacttcgatcatctgcctttagcatttggcggcggtactaaagtggagatcaaaggagcgacgccgcctgagactggagcagagaccgaatcacctggtgagacgacgggcgggtcagccgaaagcgagccaccgggggaagggcaggttcaattgcaagaaagtggaccgggcgccgtcaaacccagccagaccctctccctgacctgcacagtcagcggagggtctgtgagctcaggcgactactattggacctggattagacaacgtccaggtaaaggtcttgagtggattggccacatctactatagcggtaacaccaactataatccgagcctgaaaagtcgtctgaccatcagcatcgacaccagcaaaacccagtttagcctgaaattaagcagcgttacagcagcggatacagcgacctactattgtgtccgtgatcgcgttactggcgcatttgatatttgggggcagggaacaacagttactgtgtcaagtggaggaggtggcagtgaactggttgttacacaagaaccgtccttaacagttagtccggggggcaccgtcacattaacatgtcgttcaagtacaggtgcagtaaccacgtccaactatgcaaattgggttcaacagaagcccggacaggccccgagaggtttaataggtggaacaaacaaaagagcacctggtacacctgcccggttctccggatcctctctcggcggttccgcagcattaaccttaagtggtgttcagccggaagatgaagcggagtattactgcgcactttggtatagcaacttatgggtgtttggaggcggtacaaaattgaccgttctgggtgcgacgccgcccgaaacgggcgcggagacggagtccccaggtgaaaccactggtggaagcgcagaatcagagccaccgggcgagggggaagtacaattacaggagtccggcggaggtctggttcagcctggtggtagcctcaaactgtcctgcgcagcaagcggttttacctttaacacctacgccatgaactgggtgcgtcaagctcctggtaaaggcttagaatgggttgcgcgtattcgtagcaaatacaacaactatgccacctattacgcggacagtgtaaaagaccgtttcaccatcagccgcgatgatagcaaaaatacagcctatctgcagatgaacaacctgaagaccgaagacacggccgtctactactgcgtgcgtcatggcaattttggcaacagctatgttagctggttcgcgtattggggccagggaacactggtcacggtttcctcagggactgctgaggcggctagcgcctccggagaagctggaagaagcgccaatcacacaccagctggacttacaggcccgcctggtagccccgcggggagccctacaagcactgaggagggcacatctgagtccgctacccctgagagtggacccgggacaagcactgagcctagcgaaggaagcgcaccaggttcccccgctgggagccccacaagcacagaagagggaacttctaccgagccctctgagggctcagcccctggaactagcacagagccctccgaaggcagtgcaccgggtacttccgaaagcgcaactccggaatccggccctggttctgagcctgctacttccggctctgaaactccaggtagcgagccagcgacttctggttctgaaactccaggttcaccggcgggtagcccgacgagcacggaggaaggtacctctgagtcggccactcctgagtccggtccgggcacgagcaccgagccgagcgagggttcagccccgggtaccagcacggagccgtccgagggtagcgcaccgggttctccggcgggctcccctacgtctacggaagagggtacgtccactgaacctagcgagggcagcgcgccaggcaccagcactgaaccgagcgaaggcagcgcacctggcactagcgagtctgcgactccggagagcggtccgggtacgagcacggaaccaagcgaaggcagcgccccaggtacctctgaatctgctaccccagaatctggcccgggttccgagccagctacctctggttctgaaaccccaggtacttccactgaaccaagcgaaggtagcgctcctggcacttctactgaaccatccgaaggttccgctcctggtacgtctgaaagcgctacccctgaaagcggcccaggcacctctgaaagcgctactcctgagagcggtccaggctctccagcaggttctccaacctccactgaagaaggcacctctgagtctgctacccctgaatctggtcctggctccgaacctgctacctctggttccgaaactccaggtacctcggaatctgcgactccggaatctggcccgggcacgagcacggagccgtctgagggtagcgcaccaggtaccagcactgagccttctgagggctctgcaccgggtacctccacggaaccttcggaaggttctgcgccgggtacctccactgagccatccgagggttcagcaccaggtactagcacggaaccgtccgagggctctgcaccaggtacgagcaccgaaccgtcggagggtagcgctccaggtagcccagcgggctctccgacaagcaccgaagaaggcaccagcaccgagccgtccgaaggttccgcaccaggtacaagcgagagcgcgactcctgaatctggtccgggtagcgagcctgcaaccagcggttctgagacgccgggcacttccgaatctgcgaccccggagtccggtccaggttcagagccggcgacgagcggttcggaaacgccgggtacgtctgaatcagccacgccggagtctggtccgggtacctcgaccgaaccaagcgaaggttcggcaccgggtactagcgagagcgcaacccctgaaagcggtccgggcagcccggcaggttctccaaccagcaccgaagaaggttcccctgctggtagcccgacctctacggaggaaggtagccctgcaggttccccaacttctactgaggaaggtacttctgagtccgctaccccagaaagcggtcctggtacctccactgaaccgtctgaaggctctgcaccaggcacttctgagtctgctactccagaaagcggcccaggttctgaaccagcaacttctggctctgagactccaggcacttctgagtccgcaacgcctgaatccggtcctggttctgaaccagctacttccggcagcgaaaccccaggtacctctgagtctgcgactccagagtctggtcctggtacttccactgagcctagcgagggttccgcaccaggttctccggctggtagcccgaccagcacggaggagggtacgtctgaatctgcaacgccggaatcgggcccaggttcggagcctgcaacgtctggcagcgaaaccccgggtacctccgaatctgctacaccggaaagcggtcctggcagccctgctggttctccaacctctaccgaggagggttcaccggcaggtagcccgactagcactgaagaaggtactagcacggagccgagcgagggtagtgctccgggtacgagcgagagcgcaacgccagagagcggtccaggcaccagcgaatcggccacccctgagagcggcccaggtacttctgagagcgccactcctgaatccggccctggtagcgagccggcaacctccggctcagaaactcctggttcggaaccagcgaccagcggttctgaaactccgggtagcccggcaggcagcccaacgagcaccgaagagggtaccagcacggaaccgagcgagggttctgccccgggtacttccaccgaaccatcggagggctctgcacctggtagcgaacctgcgacgtctggttctgaaacgccgggtaccagcgaaagcgctaccccagaatccggtccgggcactagcaccgagccatcggagggcgccgcagaaccagaggcg

SEQ ID NO: 961 - DNA, 4260 bp, Artificial Sequence
  Description of Artificial Sequence: Synthetic polynucleotide
gatatccagatgacccagagcccttcttccctgtccgcatccgtcggcgatcgtgtcacgattacctgtcgcagcactaagagcctgctgcactcaaacggtatcacgtacctgtactggtaccagcagaagccgggcaaagcgccgaagctgctgatttatcagatgagcaacctggcatcgggcgtgccgagccgtttcagcagcagcggtagcggtaccgacttcacgctgaccatcagctcgttgcagccagaggactttgcgacgtactattgtgcgcaaaacttggaaattccgcgcaccttcggccagggtacgaaagttgagattaaaggtgccaccccaccggagactggtgcagaaaccgagtctccgggcgaaaccacgggcggtagcgcggagagcgaaccgcctggtgagggtcaagttcaattggttcagagcggtccgggtctggttcaaccgggcggcagcgtgcgcatttcttgtgcggccagcggttacacctttacgaactacggtatgaattgggtgaaacaagctccgggcaaaggtctggagtggatgggttggatcaatacctataccggtgaatccacttacgcggattcctttaagggccgtttcaccttcagcctggacacgagcgcgagcgctgcatatctgcaaatcaatagcctgcgtgccgaagataccgcggtgtactattgcgcgcgttttgcaatcaagggcgactattggggtcaaggcacgctgctgaccgtgagcagcggtggtggcggcagcgatatccaaatgacccaatccccatcctccctgtctgcaagcgttggtgatcgtgtgacgattacgtgccgtgcctcccaagatatccgtaactacctgaattggtatcagcagaaaccgggcaaggctccgaaattgctgatctactacaccagccgcctggagtcgggtgtgcctagccgcttcagcggcagcggttcgggtaccgactataccttgaccattagcagcctgcagccggaagatttcgcgacgtattactgccaacagggtaacacgctgccgtggacctttggccaaggtaccaaagtcgagattaagggtgcgaccccgccggaaaccggtgcggaaaccgagagcccgggtgaaacgactggcggctctgcagagagcgagccgccaggtgagggcgaagtccaactggtcgagtctggtggcggcctggtgcaaccgggtggcagcctgcgtctgagctgcgctgcgagcggctatagctttaccggttataccatgaactgggttcgccaggcaccgggtaagggtctggaatgggtggcgctgatcaatccgtacaaaggtgtgagcacttacaatcagaaattcaaagaccgtttcaccattagcgttgacaagagcaagaataccgcgtatctgcagatgaacagcttgcgcgccgaggatacggccgtttactactgtgcacgtagcggctattacggtgacagcgactggtactttgacgtctggggtcagggcacgctggtcaccgttagcagcggcaccgccgaagcagctagcgcctctggcctgtcaggtcgttctgataaccattccccactgggtctggctgggtctccaggtagcccagctggtagcccaacctctaccgaagaaggtacctctgaatccgctactccagaatccggtcctggtactagcactgagccaagcgaaggttctgctccaggctccccggcaggtagccctacctctaccgaagagggcactagcaccgaaccatctgagggttccgctcctggcacctccactgaaccgtccgaaggcagtgctccgggtacttccgaaagcgcaactccggaatccggccctggttctgagcctgctacttccggctctgaaactccaggtagcgagccagcgacttctggttctgaaactccaggttcaccggcgggtagcccgacgagcacggaggaaggtacctctgagtcggccactcctgagtccggtccgggcacgagcaccgagccgagcgagggttcagccccgggtaccagcacggagccgtccgagggtagcgcaccgggttctccggcgggctcccctacgtctacggaagagggtacgtccactgaacctagcgagggcagcgcgccaggcaccagcactgaaccgagcgaaggcagcgcacctggcactagcgagtctgcgactccggagagcggtccgggtacgagcacggaaccaagcgaaggcagcgccccaggtacctctgaatctgctaccccagaatctggcccgggttccgagccagctacctctggttctgaaaccccaggtacttccactgaaccaagcgaaggtagcgctcctggcacttctactgaaccatccgaaggttccgctcctggtacgtctgaaagcgctacccctgaaagcggcccaggcacctctgaaagcgctactcctgagagcggtccaggctctccagcaggttctccaacctccactgaagaaggcacctctgagtctgctacccctgaatctggtcctggctccgaacctgctacctctggttccgaaactccaggtacctcggaatctgcgactccggaatctggcccgggcacgagcacggagccgtctgagggtagcgcaccaggtaccagcactgagccttctgagggctctgcaccgggtacctccacggaaccttcggaaggttctgcgccgggtacctccactgagccatccgagggttcagcaccaggtactagcacggaaccgtccgagggctctgcaccaggtacgagcaccgaaccgtcggagggtagcgctccaggtagcccagcgggctctccgacaagcaccgaagaaggcaccagcaccgagccgtccgaaggttccgcaccaggtacaagcgagagcgcgactcctgaatctggtccgggtagcgagcctgcaaccagcggttctgagacgccgggcacttccgaatctgcgaccccggagtccggtccaggttcagagccggcgacgagcggttcggaaacgccgggtacgtctgaatcagccacgccggagtctggtccgggtacctcgaccgaaccaagcgaaggttcggcaccgggtactagcgagagcgcaacccctgaaagcggtccgggcagcccggcaggttctccaaccagcaccgaagaaggttcccctgctggtagcccgacctctacggaggaaggtagccctgcaggttccccaacttctactgaggaaggtacttctgagtccgctaccccagaaagcggtcctggtacctccactgaaccgtctgaaggctctgcaccaggcacttctgagtctgctactccagaaagcggcccaggttctgaaccagcaacttctggctctgagactccaggcacttctgagtccgcaacgcctgaatccggtcctggttctgaaccagctacttccggcagcgaaaccccaggtacctctgagtctgcgactccagagtctggtcctggtacttccactgagcctagcgagggttccgcaccaggttctccggctggtagcccgaccagcacggaggagggtacgtctgaatctgcaacgccggaatcgggcccaggttcggagcctgcaacgtctggcagcgaaaccccgggtacctccgaatctgctacaccggaaagcggtcctggcagccctgctggttctccaacctctaccgaggagggttcaccggcaggtagcccgactagcactgaagaaggtactagcacggagccgagcgagggtagtgctccgggtacgagcgagagcgcaacgccagagagcggtccaggcaccagcgaatcggccacccctgagagcggcccaggtacttctgagagcgccactcctgaatccggccctggtagcgagccggcaacctccggctcagaaactcctggttcggaaccagcgaccagcggttctgaaactccgggtagcccggcaggcagcccaacgagcaccgaagagggtaccagcacggaaccgagcgagggttctgccccgggtacttccaccgaaccatcggagggctctgcacctggtagcgaacctgcgacgtctggttctgaaacgccgggtaccagcgaaagcgctaccccagaatccggtccgggcactagcaccgagccatcggagggctccgcaccaggtcaccatcatcaccatcac

SEQ ID NO: 962 - DNA, 4260 bp, Artificial Sequence
  Description of Artificial Sequence: Synthetic polynucleotide
gatatccagatgacccagagcccttcttccctgtccgcatccgtcggcgatcgtgtcacgattacctgtcgcagcactaagagcctgctgcactcaaacggtatcacgtacctgtactggtaccagcagaagccgggcaaagcgccgaagctgctgatttatcagatgagcaacctggcatcgggcgtgccgagccgtttcagcagcagcggtagcggtaccgacttcacgctgaccatcagctcgttgcagccagaggactttgcgacgtactattgtgcgcaaaacttggaaattccgcgcaccttcggccagggtacgaaagttgagattaaaggtgccaccccaccggagactggtgcagaaaccgagtctccgggcgaaaccacgggcggtagcgcggagagcgaaccgcctggtgagggtcaagttcaattggttcagagcggtccgggtctggttcaaccgggcggcagcgtgcgcatttcttgtgcggccagcggttacacctttacgaactacggtatgaattgggtgaaacaagctccgggcaaaggtctggagtggatgggttggatcaatacctataccggtgaatccacttacgcggattcctttaagggccgtttcaccttcagcctggacacgagcgcgagcgctgcatatctgcaaatcaatagcctgcgtgccgaagataccgcggtgtactattgcgcgcgttttgcaatcaagggcgactattggggtcaaggcacgctgctgaccgtgtcctcaggtggtggcggcagcgatatccaaatgacccaatccccatcctccctgtctgcaagcgttggtgatcgtgtgacgattacgtgccgtgcctcccaagatatccgtaactacctgaattggtatcagcagaaaccgggcaaggctccgaaattgctgatctactacaccagccgcctggagtcgggtgtgcctagccgcttcagcggcagcggttcgggtaccgactataccttgaccattagcagcctgcagccggaagatttcgcgacgtattactgccaacagggtaacacgctgccgtggacctttggccaaggtaccaaagtcgagattaagggtgcgaccccgccggaaaccggtgcggaaaccgagagcccgggtgaaacgactggcggctctgcagagagcgagccgccaggtgagggcgaagtccaactggtcgagtctggtggcggcctggtgcaaccgggtggcagcctgcgtctgagctgcgctgcgagcggctatagctttaccggttataccatgaactgggttcgccaggcaccgggtaagggtctggaatgggtggcgctgatcaatccgtacaaaggtgtgagcacttacaatcagaaattcaaagaccgtttcaccattagcgttgacaagagcaagaataccgcgtatctgcagatgaacagcttgcgcgccgaggatacggccgtttactactgtgcacgtagcggctattacggtgacagcgactggtactttgacgtctggggtcagggcacgctggtcaccgttagcagcggcaccgccgaagcagctagcgcctctggcctgtcaggtcgttctgataaccattccccactgggtctggctgggtctccaggtagcccagctggtagcccaacctctaccgaagaaggtacctctgaatccgctactccagaatccggtcctggtactagcactgagccaagcgaaggttctgctccaggctccccggcaggtagccctacctctaccgaagagggcactagcaccgaaccatctgagggttccgctcctggcacctccactgaaccgtccgaaggcagtgctccgggtacttccgaaagcgcaactccggaatccggccctggttctgagcctgctacttccggctctgaaactccaggtagcgagccagcgacttctggttctgaaactccaggttcaccggcgggtagcccgacgagcacggaggaaggtacctctgagtcggccactcctgagtccggtccgggcacgagcaccgagccgagcgagggttcagccccgggtaccagcacggagccgtccgagggtagcgcaccgggttctccggcgggctcccctacgtctacggaagagggtacgtccactgaacctagcgagggcagcgcgccaggcaccagcactgaaccgagcgaaggcagcgcacctggcactagcgagtctgcgactccggagagcggtccgggtacgagcacggaaccaagcgaaggcagcgccccaggtacctctgaatctgctaccccagaatctggcccgggttccgagccagctacctctggttctgaaaccccaggtacttccactgaaccaagcgaaggtagcgctcctggcacttctactgaaccatccgaaggttccgctcctggtacgtctgaaagcgctacccctgaaagcggcccaggcacctctgaaagcgctactcctgagagcggtccaggctctccagcaggttctccaacctccactgaagaaggcacctctgagtctgctacccctgaatctggtcctggctccgaacctgctacctctggttccgaaactccaggtacctcggaatctgcgactccggaatctggcccgggcacgagcacggagccgtctgagggtagcgcaccaggtaccagcactgagccttctgagggctctgcaccgggtacctccacggaaccttcggaaggttctgcgccgggtacctccactgagccatccgagggttcagcaccaggtactagcacggaaccgtccgagggctctgcaccaggtacgagcaccgaaccgtcggagggtagcgctccaggtagcccagcgggctctccgacaagcaccgaagaaggcaccagcaccgagccgtccgaaggttccgcaccaggtacaagcgagagcgcgactcctgaatctggtccgggtagcgagcctgcaaccagcggttctgagacgccgggcacttccgaatctgcgaccccggagtccggtccaggttcagagccggcgacgagcggttcggaaacgccgggtacgtctgaatcagccacgccggagtctggtccgggtacctcgaccgaaccaagcgaaggttcggcaccgggtactagcgagagcgcaacccctgaaagcggtccgggcagcccggcaggttctccaaccagcaccgaagaaggttcccctgctggtagcccgacctctacggaggaaggtagccctgcaggttccccaacttctactgaggaaggtacttctgagtccgctaccccagaaagcggtcctggtacctccactgaaccgtctgaaggctctgcaccaggcacttctgagtctgctactccagaaagcggcccaggttctgaaccagcaacttctggctctgagactccaggcacttctgagtccgcaacgcctgaatccggtcctggttctgaaccagctacttccggcagcgaaaccccaggtacctctgagtctgcgactccagagtctggtcctggtacttccactgagcctagcgagggttccgcaccaggttctccggctggtagcccgaccagcacggaggagggtacgtctgaatctgcaacgccggaatcgggcccaggttcggagcctgcaacgtctggcagcgaaaccccgggtacctccgaatctgctacaccggaaagcggtcctggcagccctgctggttctccaacctctaccgaggagggttcaccggcaggtagcccgactagcactgaagaaggtactagcacggagccgagcgagggtagtgctccgggtacgagcgagagcgcaacgccagagagcggtccaggcaccagcgaatcggccacccctgagagcggcccaggtacttctgagagcgccactcctgaatccggccctggtagcgagccggcaacctccggctcagaaactcctggttcggaaccagcgaccagcggttctgaaactccgggtagcccggcaggcagcccaacgagcaccgaagagggtaccagcacggaaccgagcgagggttctgccccgggtacttccaccgaaccatcggagggctctgcacctggtagcgaacctgcgacgtctggttctgaaacgccgggtaccagcgaaagcgctaccccagaatccggtccgggcactagcaccgagccatcggagggctccgcaccaggtcaccatcatcaccatcac

SEQ ID NO: 963 - DNA, 4260 bp, Artificial Sequence
  Description of Artificial Sequence: Synthetic polynucleotide
gatatccagatgacccagagcccttcttccctgtccgcatccgtcggcgatcgtgtcacgattacctgtcgcagcactaagagcctgctgcactcaaacggtatcacgtacctgtactggtaccagcagaagccgggcaaagcgccgaagctgctgatttatcagatgagcaacctggcatcgggcgtgccgagccgtttcagcagcagcggtagcggtaccgacttcacgctgaccatcagctcgttgcagccagaggactttgcgacgtactattgtgcgcaaaacttggaaattccgcgcaccttcggccagggtacgaaagttgagattaaaggtgccaccccaccggagactggtgcagaaaccgagtctccgggcgaaaccacgggcggtagcgcggagagcgaaccgcctggtgagggtcaagttcaattggttcagagcggtccgggtctggttcaaccgggcggcagcgtgcgcatttcttgtgcggccagcggttacacctttacgaactacggtatgaattgggtgaaacaagctccgggcaaaggtctggagtggatgggttggatcaatacctataccggtgaatccacttacgcggattcctttaagggccgtttcaccttcagcctggacacgagcgcgagcgctgcatatctgcaaatcaatagcctgcgtgccgaagataccgcggtgtactattgcgcgcgttttgcaatcaagggcgactattggggtcaaggcacgctgctgaccgtgtcctcaggtggtggcggcagcgatatccaaatgacccaatccccatcctccctgtctgcaagcgttggtgatcgtgtgacgattacgtgccgtgcctcccaagatatccgtaactacctgaattggtatcagcagaaaccgggcaaggctccgaaattgctgatctactacaccagccgcctggagtcgggtgtgcctagccgcttcagcggcagcggttcgggtaccgactataccttgaccattagcagcctgcagccggaagatttcgcgacgtattactgccaacagggtaacacgctgccgtggacctttggccaaggtaccaaagtcgagattaagggtgcgaccccgccggaaaccggtgcggaaaccgagagcccgggtgaaacgactggcggctctgcagagagcgagccgccaggtgagggcgaagtccaactggtcgagtctggtggcggcctggtgcaaccgggtggcagcctgcgtctgagctgcgctgcgagcggctatagctttaccggttataccatgaactgggttcgccaggcaccgggtaagggtctggaatgggtggcgctgatcaatccgtacaaaggtgtgagcacttacaatcagaaattcaaagaccgtttcaccattagcgttgacaagagcaagaataccgcgtatctgcagatgaacagcttgcgcgccgaggatacggccgtttactactgtgcacgtagcggctattacggtgacagcgactggtactttgacgtctggggtcagggcacgctggtcaccgttagcagcggcaccgccgaagcagctagcgcctctggcgaatctggtcgtgcagctaacaccgctccagagggtctgactgggcctccaggtagcccagctggtagcccaacctctaccgaagaaggtacctctgaatccgctactccagaatccggtcctggtactagcactgagccaagcgaaggttctgctccaggctccccggcaggtagccctacctctaccgaagagggcactagcaccgaaccatctgagggttccgctcctggcacctccactgaaccgtccgaaggcagtgctccgggtacttccgaaagcgcaactccggaatccggccctggttctgagcctgctacttccggctctgaaactccaggtagcgagccagcgacttctggttctgaaactccaggttcaccggcgggtagcccgacgagcacggaggaaggtacctctgagtcggccactcctgagtccggtccgggcacgagcaccgagccgagcgagggttcagccccgggtaccagcacggagccgtccgagggtagcgcaccgggttctccggcgggctcccctacgtctacggaagagggtacgtccactgaacctagcgagggcagcgcgccaggcaccagcactgaaccgagcgaaggcagcgcacctggcactagcgagtctgcgactccggagagcggtccgggtacgagcacggaaccaagcgaaggcagcgccccaggtacctctgaatctgctaccccagaatctggcccgggttccgagccagctacctctggttctgaaaccccaggtacttccactgaaccaagcgaaggtagcgctcctggcacttctactgaaccatccgaaggttccgctcctggtacgtctgaaagcgctacccctgaaagcggcccaggcacctctgaaagcgctactcctgagagcggtccaggctctccagcaggttctccaacctccactgaagaaggcacctctgagtctgctacccctgaatctggtcctggctccgaacctgctacctctggttccgaaactccaggtacctcggaatctgcgactccggaatctggcccgggcacgagcacggagccgtctgagggtagcgcaccaggtaccagcactgagccttctgagggctctgcaccgggtacctccacggaaccttcggaaggttctgcgccgggtacctccactgagccatccgagggttcagcaccaggtactagcacggaaccgtccgagggctctgcaccaggtacgagcaccgaaccgtcggagggtagcgctccaggtagcccagcgggctctccgacaagcaccgaagaaggcaccagcaccgagccgtccgaaggttccgcaccaggtacaagcgagagcgcgactcctgaatctggtccgggtagcgagcctgcaaccagcggttctgagacgccgggcacttccgaatctgcgaccccggagtccggtccaggttcagagccggcgacgagcggttcggaaacgccgggtacgtctgaatcagccacgccggagtctggtccgggtacctcgaccgaaccaagcgaaggttcggcaccgggtactagcgagagcgcaacccctgaaagcggtccgggcagcccggcaggttctccaaccagcaccgaagaaggttcccctgctggtagcccgacctctacggaggaaggtagccctgcaggttccccaacttctactgaggaaggtacttctgagtccgctaccccagaaagcggtcctggtacctccactgaaccgtctgaaggctctgcaccaggcacttctgagtctgctactccagaaagcggcccaggttctgaaccagcaacttctggctctgagactccaggcacttctgagtccgcaacgcctgaatccggtcctggttctgaaccagctacttccggcagcgaaaccccaggtacctctgagtctgcgactccagagtctggtcctggtacttccactgagcctagcgagggttccgcaccaggttctccggctggtagcccgaccagcacggaggagggtacgtctgaatctgcaacgccggaatcgggcccaggttcggagcctgcaacgtctggcagcgaaaccccgggtacctccgaatctgctacaccggaaagcggtcctggcagccctgctggttctccaacctctaccgaggagggttcaccggcaggtagcccgactagcactgaagaaggtactagcacggagccgagcgagggtagtgctccgggtacgagcgagagcgcaacgccagagagcggtccaggcaccagcgaatcggccacccctgagagcggcccaggtacttctgagagcgccactcctgaatccggccctggtagcgagccggcaacctccggctcagaaactcctggttcggaaccagcgaccagcggttctgaaactccgggtagcccggcaggcagcccaacgagcaccgaagagggtaccagcacggaaccgagcgagggttctgccccgggtacttccaccgaaccatcggagggctctgcacctggtagcgaacctgcgacgtctggttctgaaacgccgggtaccagcgaaagcgctaccccagaatccggtccgggcactagcaccgagccatcggagggctccgcaccaggtcaccatcatcaccatcac

SEQ ID NO: 964 - DNA, 5232 bp, Artificial Sequence
  Description of Artificial Sequence: Synthetic polynucleotide
caccatcatcaccatcactccccagcaggcagcccgaccagcaccgaggagggtacgagcgagtcggctactccagagagcggtccgggtacctctacggaaccgtccgaaggtagcgctccaggcacgtctgaaagcgcgacgccggaaagcggtccaggcagcgagccggcgacctccggtagcgaaacgcctggtacctcggagtcagcgactccggaaagcggtccgggtagcgaacctgcaacgagcggtagcgagactccaggcactagcgaatccgcaactccggagtcgggtccgggcacctctacggagcctagcgagggctcagcaccaggtagccctgcaggttccccgacgtcaaccgaggaaggtacaagcgaaagcgccacccctgagtcgggccctggcagcgaaccggcaactagcggcagcgagactccgggtaccagcgagtctgctacgccagagagcggcccaggttcgccagcgggttcgccgactagcacggaggagggcagcccagcgggtagcccgaccagcactgaggagggtacgtccaccgaaccgagcgaaggtagcgcaccaggtacctccgagtctgccacccctgaatccggtccaggtaccagcgaatcagccaccccggagtcgggtccaggtacgagcgaatctgctaccccggaatccggcccaggcagcgaacctgctactagcggcagcgaaacgccgggcagcgaacctgccacgtcaggcagcgagacgccgggttcccctgcaggctccccgaccagcactgaggagggcacctccaccgaaccatcagaaggtagcgcgcctggtacgtcaaccgaaccttccgagggcagcgcaccgggtggctcagcgcctgaggcaggtcgttctgctaaccatacccctgcaggattaactggccccgccaccagcgggagcgagacccccgggactgatattcagatgacccagagcccgtcctccctgagcgcttctgttggcgaccgcgtgaccatcacctgccgtgcttcccaggatgttaacaccgctgtagcttggtatcaacagaaaccgggcaaagcaccgaaactgctgatctactctgcttcctttctgtatagcggtgttccgtctcgtttcagcggctctcgtagcggtacggattttactctgacgatcagctctctgcagccggaggacttcgctacctactactgccagcagcactacaccaccccgcctacctttggtcagggcaccaaagtggaaatcaagggtgcaacgcctccggagactggtgctgaaactgagtccccgggcgagacgaccggtggctctgctgaatccgaaccaccgggcgaaggcgaggtccagctggttgagtctggcggcggtctggtccaacctggtggctccctgcgcctgtcttgcgcagcgtccggctttaatatcaaagatacgtacattcactgggtccgccaggcaccgggcaaaggcctggaatgggttgctcgtatctacccgactaacggttatacccgttatgcagacagcgtaaagggtcgcttcacgatctccgcggatacctccaaaaacaccgcatacctgcaaatgaactctctgcgtgcggaagatactgccgtgtactactgctctcgctggggcggtgacggtttctatgcaatggactactggggtcaaggtactctggtaactgtttcctctggtggtggcggcagcgagttagttgtgacccaagagccgagcctgaccgttagcccgggtggtacggtcaccctgacgtgccgtagcagcaacggtgcggtcacgagcagcaactatgccaattgggtccagcagaaaccgggtcaagcaccgcgtggcctgatcggcggcaccaataaacgtgccccgggtactcctgcgcgtttctccggtagcctgctgggcggcaaagccgctctgaccctgagcggtgtccagccggaagatgaagcggtgtactactgcgcgctgtggtatccgaatctgtgggtttttggcggcggtaccaagctgaccgtattgggtgctacgccaccggagactggcgcagaaacggaaagcccgggtgagactacgggtggctctgcggagagcgaacctccgggtgagggtgaggtccaactgctggagtctggtggtggcattgttcaaccgggtggctcgttgaagctgagctgtgcagctagcggctttaccttcaacacctatgcgatgaattgggttcgtcaggcaccgggtaagggcctggaatgggtggcgcgtatccgctccaagtacaacaactacgcgacctactacgcggatagcgttaaagaccgcttcacgattagccgtgacgattccaagaatacggtgtatctgcaaatgaacaatctgaaaaccgaagataccgcggtgtattactgtgtgcgccacgaaaatttcggcaacagctacgtgagctggtttgcacattggggtcagggcaccctggttacggtgagctccgggactgctgaggcggctagcgcctccggagaagctggaagaagcgccaatcacacaccagctggacttacaggcccgcctggtagccccgcggggagccctacaagcactgaggagggcacatctgagtccgctacccctgagagtggacccgggacaagcactgagcctagcgaaggaagcgcaccaggttcccccgctgggagccccacaagcacagaagagggaacttctaccgagccctctgagggctcagcccctggaactagcacagagccctccgaaggcagtgcaccgggtacttccgaaagcgcaactccggaatccggccctggttctgagcctgctacttccggctctgaaactccaggtagcgagccagcgacttctggttctgaaactccaggttcaccggcgggtagcccgacgagcacggaggaaggtacctctgagtcggccactcctgagtccggtccgggcacgagcaccgagccgagcgagggttcagccccgggtaccagcacggagccgtccgagggtagcgcaccgggttctccggcgggctcccctacgtctacggaagagggtacgtccactgaacctagcgagggcagcgcgccaggcaccagcactgaaccgagcgaaggcagcgcacctggcactagcgagtctgcgactccggagagcggtccgggtacgagcacggaaccaagcgaaggcagcgccccaggtacctctgaatctgctaccccagaatctggcccgggttccgagccagctacctctggttctgaaaccccaggtacttccactgaaccaagcgaaggtagcgctcctggcacttctactgaaccatccgaaggttccgctcctggtacgtctgaaagcgctacccctgaaagcggcccaggcacctctgaaagcgctactcctgagagcggtccaggctctccagcaggttctccaacctccactgaagaaggcacctctgagtctgctacccctgaatctggtcctggctccgaacctgctacctctggttccgaaactccaggtacctcggaatctgcgactccggaatctggcccgggcacgagcacggagccgtctgagggtagcgcaccaggtaccagcactgagccttctgagggctctgcaccgggtacctccacggaaccttcggaaggttctgcgccgggtacctccactgagccatccgagggttcagcaccaggtactagcacggaaccgtccgagggctctgcaccaggtacgagcaccgaaccgtcggagggtagcgctccaggtagcccagcgggctctccgacaagcaccgaagaaggcaccagcaccgagccgtccgaaggttccgcaccaggtacaagcgagagcgcgactcctgaatctggtccgggtagcgagcctgcaaccagcggttctgagacgccgggcacttccgaatctgcgaccccggagtccggtccaggttcagagccggcgacgagcggttcggaaacgccgggtacgtctgaatcagccacgccggagtctggtccgggtacctcgaccgaaccaagcgaaggttcggcaccgggtactagcgagagcgcaacccctgaaagcggtccgggcagcccggcaggttctccaaccagcaccgaagaaggttcccctgctggtagcccgacctctacggaggaaggtagccctgcaggttccccaacttctactgaggaaggtacttctgagtccgctaccccagaaagcggtcctggtacctccactgaaccgtctgaaggctctgcaccaggcacttctgagtctgctactccagaaagcggcccaggttctgaaccagcaacttctggctctgagactccaggcacttctgagtccgcaacgcctgaatccggtcctggttctgaaccagctacttccggcagcgaaaccccaggtacctctgagtctgcgactccagagtctggtcctggtacttccactgagcctagcgagggttccgcaccaggttctccggctggtagcccgaccagcacggaggagggtacgtctgaatctgcaacgccggaatcgggcccaggttcggagcctgcaacgtctggcagcgaaaccccgggtacctccgaatctgctacaccggaaagcggtcctggcagccctgctggttctccaacctctaccgaggagggttcaccggcaggtagcccgactagcactgaagaaggtactagcacggagccgagcgagggtagtgctccgggtacgagcgagagcgcaacgccagagagcggtccaggcaccagcgaatcggccacccctgagagcggcccaggtacttctgagagcgccactcctgaatccggccctggtagcgagccggcaacctccggctcagaaactcctggttcggaaccagcgaccagcggttctgaaactccgggtagcccggcaggcagcccaacgagcaccgaagagggtaccagcacggaaccgagcgagggttctgccccgggtacttccaccgaaccatcggagggctctgcacctggtagcgaacctgcgacgtctggttctgaaacgccgggtaccagcgaaagcgctaccccagaatccggtccgggcactagcaccgagccatcggagggcgccgcagaaccagaggcg

SEQ ID NO: 965 - DNA, 5250 bp, Artificial Sequence
  Description of Artificial Sequence: Synthetic polynucleotide
caccatcatcaccatcactccccagcaggcagcccgaccagcaccgaggagggtacgagcgagtcggctactccagagagcggtccgggtacctctacggaaccgtccgaaggtagcgctccaggcacgtctgaaagcgcgacgccggaaagcggtccaggcagcgagccggcgacctccggtagcgaaacgcctggtacctcggagtcagcgactccggaaagcggtccgggtagcgaacctgcaacgagcggtagcgagactccaggcactagcgaatccgcaactccggagtcgggtccgggcacctctacggagcctagcgagggctcagcaccaggtagccctgcaggttccccgacgtcaaccgaggaaggtacaagcgaaagcgccacccctgagtcgggccctggcagcgaaccggcaactagcggcagcgagactccgggtaccagcgagtctgctacgccagagagcggcccaggttcgccagcgggttcgccgactagcacggaggagggcagcccagcgggtagcccgaccagcactgaggagggtacgtccaccgaaccgagcgaaggtagcgcaccaggtacctccgagtctgccacccctgaatccggtccaggtaccagcgaatcagccaccccggagtcgggtccaggtacgagcgaatctgctaccccggaatccggcccaggcagcgaacctgctactagcggcagcgaaacgccgggcagcgaacctgccacgtcaggcagcgagacgccgggttcccctgcaggctccccgaccagcactgaggagggcacctccaccgaaccatcagaaggtagcgcgcctggtacgtcaaccgaaccttccgagggcagcgcaccgggtggctcagcgcctacgactggtgaagccggagaggcagctggtgctacaagcgccggcgctactgggcctgctaccagcggctctgagacccctggaacagatattcagatgacccagagcccgtcctccctgagcgcttctgttggcgaccgcgtgaccatcacctgccgtgcttcccaggatgttaacaccgctgtagcttggtatcaacagaaaccgggcaaagcaccgaaactgctgatctactctgcttcctttctgtatagcggtgttccgtctcgtttcagcggctctcgtagcggtacggattttactctgacgatcagctctctgcagccggaggacttcgctacctactactgccagcagcactacaccaccccgcctacctttggtcagggcaccaaagtggaaatcaagggtgcaacgcctccggagactggtgctgaaactgagtccccgggcgagacgaccggtggctctgctgaatccgaaccaccgggcgaaggcgaggtccagctggttgagtctggcggcggtctggtccaacctggtggctccctgcgcctgtcttgcgcagcgtccggctttaatatcaaagatacgtacattcactgggtccgccaggcaccgggcaaaggcctggaatgggttgctcgtatctacccgactaacggttatacccgttatgcagacagcgtaaagggtcgcttcacgatctccgcggatacctccaaaaacaccgcatacctgcaaatgaactctctgcgtgcggaagatactgccgtgtactactgctctcgctggggcggtgacggtttctatgcaatggactactggggtcaaggtactctggtaactgtttcctctggtggtggcggcagcgagttagttgtgacccaagagccgagcctgaccgttagcccgggtggtacggtcaccctgacgtgccgtagcagcaacggtgcggtcacgagcagcaactatgccaattgggtccagcagaaaccgggtcaagcaccgcgtggcctgatcggcggcaccaataaacgtgccccgggtactcctgcgcgtttctccggtagcctgctgggcggcaaagccgctctgaccctgagcggtgtccagccggaagatgaagcggtgtactactgcgcgctgtggtatccgaatctgtgggtttttggcggcggtaccaagctgaccgtattgggtgctacgccaccggagactggcgcagaaacggaaagcccgggtgagactacgggtggctctgcggagagcgaacctccgggtgagggtgaggtccaactgctggagtctggtggtggcattgttcaaccgggtggctcgttgaagctgagctgtgcagctagcggctttaccttcaacacctatgcgatgaattgggttcgtcaggcaccgggtaagggcctggaatgggtggcgcgtatccgctccaagtacaacaactacgcgacctactacgcggatagcgttaaagaccgcttcacgattagccgtgacgattccaagaatacggtgtatctgcaaatgaacaatctgaaaaccgaagataccgcggtgtattactgtgtgcgccacgaaaatttcggcaacagctacgtgagctggtttgcacattggggtcagggcaccctggttacggtgagctccggaacagccgaagccgctagcgcatccggtacgacaggagaggcaggggaggccgctggcgctaccagtgctggagccaccggtcctccaggcagccccgcggggagtcctacgagcactgaagaagggaccagtgagagcgccacacctgagagcggccctggaaccagcacggagccatccgaagggtcagcaccgggatctccggccggctctcccacgtcaaccgaagagggaacgagcactgagccctccgaggggagtgcgcctgggacatctacagagccatcagaaggcagtgctccgggtacttccgaaagcgcaactccggaatccggccctggttctgagcctgctacttccggctctgaaactccaggtagcgagccagcgacttctggttctgaaactccaggttcaccggcgggtagcccgacgagcacggaggaaggtacctctgagtcggccactcctgagtccggtccgggcacgagcaccgagccgagcgagggttcagccccgggtaccagcacggagccgtccgagggtagcgcaccgggttctccggcgggctcccctacgtctacggaagagggtacgtccactgaacctagcgagggcagcgcgccaggcaccagcactgaaccgagcgaaggcagcgcacctggcactagcgagtctgcgactccggagagcggtccgggtacgagcacggaaccaagcgaaggcagcgccccaggtacctctgaatctgctaccccagaatctggcccgggttccgagccagctacctctggttctgaaaccccaggtacttccactgaaccaagcgaaggtagcgctcctggcacttctactgaaccatccgaaggttccgctcctggtacgtctgaaagcgctacccctgaaagcggcccaggcacctctgaaagcgctactcctgagagcggtccaggctctccagcaggttctccaacctccactgaagaaggcacctctgagtctgctacccctgaatctggtcctggctccgaacctgctacctctggttccgaaactccaggtacctcggaatctgcgactccggaatctggcccgggcacgagcacggagccgtctgagggtagcgcaccaggtaccagcactgagccttctgagggctctgcaccgggtacctccacggaaccttcggaaggttctgcgccgggtacctccactgagccatccgagggttcagcaccaggtactagcacggaaccgtccgagggctctgcaccaggtacgagcaccgaaccgtcggagggtagcgctccaggtagcccagcgggctctccgacaagcaccgaagaaggcaccagcaccgagccgtccgaaggttccgcaccaggtacaagcgagagcgcgactcctgaatctggtccgggtagcgagcctgcaaccagcggttctgagacgccgggcacttccgaatctgcgaccccggagtccggtccaggttcagagccggcgacgagcggttcggaaacgccgggtacgtctgaatcagccacgccggagtctggtccgggtacctcgaccgaaccaagcgaaggttcggcaccgggtactagcgagagcgcaacccctgaaagcggtccgggcagcccggcaggttctccaaccagcaccgaagaaggttcccctgctggtagcccgacctctacggaggaaggtagccctgcaggttccccaacttctactgaggaaggtacttctgagtccgctaccccagaaagcggtcctggtacctccactgaaccgtctgaaggctctgcaccaggcacttctgagtctgctactccagaaagcggcccaggttctgaaccagcaacttctggctctgagactccaggcacttctgagtccgcaacgcctgaatccggtcctggttctgaaccagctacttccggcagcgaaaccccaggtacctctgagtctgcgactccagagtctggtcctggtacttccactgagcctagcgagggttccgcaccaggttctccggctggtagcccgaccagcacggaggagggtacgtctgaatctgcaacgccggaatcgggcccaggttcggagcctgcaacgtctggcagcgaaaccccgggtacctccgaatctgctacaccggaaagcggtcctggcagccctgctggttctccaacctctaccgaggagggttcaccggcaggtagcccgactagcactgaagaaggtactagcacggagccgagcgagggtagtgctccgggtacgagcgagagcgcaacgccagagagcggtccaggcaccagcgaatcggccacccctgagagcggcccaggtacttctgagagcgccactcctgaatccggccctggtagcgagccggcaacctccggctcagaaactcctggttcggaaccagcgaccagcggttctgaaactccgggtagcccggcaggcagcccaacgagcaccgaagagggtaccagcacggaaccgagcgagggttctgccccgggtacttccaccgaaccatcggagggctctgcacctggtagcgaacctgcgacgtctggttctgaaacgccgggtaccagcgaaagcgctaccccagaatccggtccgggcactagcaccgagccatcggagggcgccgcagaaccagaggcg

SEQ ID NO: 966 - DNA, 5229 bp, Artificial Sequence
  Description of Artificial Sequence: Synthetic polynucleotide
caccatcatcaccatcactccccagcaggcagcccgaccagcaccgaggagggtacgagcgagtcggctactccagagagcggtccgggtacctctacggaaccgtccgaaggtagcgctccaggcacgtctgaaagcgcgacgccggaaagcggtccaggcagcgagccggcgacctccggtagcgaaacgcctggtacctcggagtcagcgactccggaaagcggtccgggtagcgaacctgcaacgagcggtagcgagactccaggcactagcgaatccgcaactccggagtcgggtccgggcacctctacggagcctagcgagggctcagcaccaggtagccctgcaggttccccgacgtcaaccgaggaaggtacaagcgaaagcgccacccctgagtcgggccctggcagcgaaccggcaactagcggcagcgagactccgggtaccagcgagtctgctacgccagagagcggcccaggttcgccagcgggttcgccgactagcacggaggagggcagcccagcgggtagcccgaccagcactgaggagggtacgtccaccgaaccgagcgaaggtagcgcaccaggtacctccgagtctgccacccctgaatccggtccaggtaccagcgaatcagccaccccggagtcgggtccaggtacgagcgaatctgctaccccggaatccggcccaggcagcgaacctgctactagcggcagcgaaacgccgggcagcgaacctgccacgtcaggcagcgagacgccgggttcccctgcaggctccccgaccagcactgaggagggcacctccaccgaaccatcagaaggtagcgcgcctggtacgtcaaccgaaccttccgagggcagcgcaccgggtggctcagcgcctgaggcaggtcgttctgctaaccatacccctgcaggattaactggccccgccaccagcgggagcgagacccccgggactgatatccagatgacccaaagccctagttcattaagcgcatcggtgggtgaccgggtaaccattacctgtcaagcaagtcaggatatcagcaactacctgaactggtaccagcagaaacccggaaaagcgccgaaactgctgatctatgatgccagcaatctggaaacaggtgttcctagccgtttctctggatcaggttcaggaaccgattttacattcaccattagctcattacagccggaggatatcgcgacgtatttttgccagcacttcgatcatctgcctttagcatttggcggcggtactaaagtggagatcaaaggagcgacgccgcctgagactggagcagagaccgaatcacctggtgagacgacgggcgggtcagccgaaagcgagccaccgggggaagggcaggttcaattgcaagaaagtggaccgggcttagtcaaacccagcgaaaccctctccctgacctgcacagtcagcggagggtctgtgagctcaggcgactactattggacctggattagacaatcaccaggtaaaggtcttgagtggattggccacatctactatagcggtaacaccaactataatccgagcctgaaaagtcgtctgaccatcagcatcgacaccagcaaaacccagtttagcctgaaattaagcagcgttacagcagcggatacagcgatttactattgtgtccgtgatcgcgttactggcgcatttgatatttgggggcagggaacaatggttactgtgtcaagtggaggaggtggcagtgaactggttgttacacaagaaccgtccttaacagttagtccggggggcaccgtcacattaacatgtcgttcaagtacaggtgcagtaaccacgtccaactatgcaaattgggttcaacagaagcccggacaggccccgagaggtttaataggtggaacaaacaaaagagcacctggtacacctgcccggttctccggatcctctctcggcggttccgcagcattaaccttaagtggtgttcagccggaagatgaagcggagtattactgcgcactttggtatagcaacttatgggtgtttggaggcggtacaaaattgaccgttctgggtgcgacgccgcccgaaacgggcgcggagacggagtccccaggtgaaaccactggtggaagcgcagaatcagagccaccgggcgagggggaagtacaattacaggagtccggcggaggtctggttcagcctggtggtagcctcaaactgtcctgcgcagcaagcggttttacctttaacacctacgccatgaactgggtgcgtcaagctcctggtaaaggcttagaatgggttgcgcgtattcgtagcaaatacaacaactatgccacctattacgcggacagtgtaaaagaccgtttcaccatcagccgcgatgatagcaaaaatacagcctatctgcagatgaacaacctgaagaccgaagacacggccgtctactactgcgtgcgtcatggcaattttggcaacagctatgttagctggttcgcgtattggggccagggaacactggtcacggtttcctcagggactgctgaggcggctagcgcctccggagaagctggaagaagcgccaatcacacaccagctggacttacaggcccgcctggtagccccgcggggagccctacaagcactgaggagggcacatctgagtccgctacccctgagagtggacccgggacaagcactgagcctagcgaaggaagcgcaccaggttcccccgctgggagccccacaagcacagaagagggaacttctaccgagccctctgagggctcagcccctggaactagcacagagccctccgaaggcagtgcaccgggtacttccgaaagcgcaactccggaatccggccctggttctgagcctgctacttccggctctgaaactccaggtagcgagccagcgacttctggttctgaaactccaggttcaccggcgggtagcccgacgagcacggaggaaggtacctctgagtcggccactcctgagtccggtccgggcacgagcaccgagccgagcgagggttcagccccgggtaccagcacggagccgtccgagggtagcgcaccgggttctccggcgggctcccctacgtctacggaagagggtacgtccactgaacctagcgagggcagcgcgccaggcaccagcactgaaccgagcgaaggcagcgcacctggcactagcgagtctgcgactccggagagcggtccgggtacgagcacggaaccaagcgaaggcagcgccccaggtacctctgaatctgctaccccagaatctggcccgggttccgagccagctacctctggttctgaaaccccaggtacttccactgaaccaagcgaaggtagcgctcctggcacttctactgaaccatccgaaggttccgctcctggtacgtctgaaagcgctacccctgaaagcggcccaggcacctctgaaagcgctactcctgagagcggtccaggctctccagcaggttctccaacctccactgaagaaggcacctctgagtctgctacccctgaatctggtcctggctccgaacctgctacctctggttccgaaactccaggtacctcggaatctgcgactccggaatctggcccgggcacgagcacggagccgtctgagggtagcgcaccaggtaccagcactgagccttctgagggctctgcaccgggtacctccacggaaccttcggaaggttctgcgccgggtacctccactgagccatccgagggttcagcaccaggtactagcacggaaccgtccgagggctctgcaccaggtacgagcaccgaaccgtcggagggtagcgctccaggtagcccagcgggctctccgacaagcaccgaagaaggcaccagcaccgagccgtccgaaggttccgcaccaggtacaagcgagagcgcgactcctgaatctggtccgggtagcgagcctgcaaccagcggttctgagacgccgggcacttccgaatctgcgaccccggagtccggtccaggttcagagccggcgacgagcggttcggaaacgccgggtacgtctgaatcagccacgccggagtctggtccgggtacctcgaccgaaccaagcgaaggttcggcaccgggtactagcgagagcgcaacccctgaaagcggtccgggcagcccggcaggttctccaaccagcaccgaagaaggttcccctgctggtagcccgacctctacggaggaaggtagccctgcaggttccccaacttctactgaggaaggtacttctgagtccgctaccccagaaagcggtcctggtacctccactgaaccgtctgaaggctctgcaccaggcacttctgagtctgctactccagaaagcggcccaggttctgaaccagcaacttctggctctgagactccaggcacttctgagtccgcaacgcctgaatccggtcctggttctgaaccagctacttccggcagcgaaaccccaggtacctctgagtctgcgactccagagtctggtcctggtacttccactgagcctagcgagggttccgcaccaggttctccggctggtagcccgaccagcacggaggagggtacgtctgaatctgcaacgccggaatcgggcccaggttcggagcctgcaacgtctggcagcgaaaccccgggtacctccgaatctgctacaccggaaagcggtcctggcagccctgctggttctccaacctctaccgaggagggttcaccggcaggtagcccgactagcactgaagaaggtactagcacggagccgagcgagggtagtgctccgggtacgagcgagagcgcaacgccagagagcggtccaggcaccagcgaatcggccacccctgagagcggcccaggtacttctgagagcgccactcctgaatccggccctggtagcgagccggcaacctccggctcagaaactcctggttcggaaccagcgaccagcggttctgaaactccgggtagcccggcaggcagcccaacgagcaccgaagagggtaccagcacggaaccgagcgagggttctgccccgggtacttccaccgaaccatcggagggctctgcacctggtagcgaacctgcgacgtctggttctgaaacgccgggtaccagcgaaagcgctaccccagaatccggtccgggcactagcaccgagccatcggagggcgccgcagaaccagaggcg

SEQ ID NO: 967 - DNA, 4395 bp, Artificial Sequence
  Description of Artificial Sequence: Synthetic polynucleotide
caccatcatcaccatcactccccagcaggcagcccgaccagcaccgaggagggtacgagcgagtcggctactccagagagcggtccgggtacctctacggaaccgtccgaaggtagcgctccaggcacgtctgaaagcgcgacgccggaaagcggtccaggcagcgagccggcgacctccggtagcgaaacgcctggtacctcggagtcagcgactccggaaagcggtccgggtagcgaacctgcaacgagcggtagcgagactccaggcactagcgaatccgcaactccggagtcgggtccgggcacctctacggagcctagcgagggctcagcaccaggtagccctgcaggttccccgacgtcaaccgaggaaggtacaagcgaaagcgccacccctgagtcgggccctggcagcgaaccggcaactagcggcagcgagactccgggtaccagcgagtctgctacgccagagagcggcccaggttcgccagcgggttcgccgactagcacggaggagggcagcccagcgggtagcccgaccagcactgaggagggtacgtccaccgaaccgagcgaaggtagcgcaccaggtacctccgagtctgccacccctgaatccggtccaggtaccagcgaatcagccaccccggagtcgggtccaggtacgagcgaatctgctaccccggaatccggcccaggcagcgaacctgctactagcggcagcgaaacgccgggcagcgaacctgccacgtcaggcagcgagacgccgggttcccctgcaggctccccgaccagcactgaggagggcacctccaccgaaccatcagaaggtagcgcgcctggtacgtcaaccgaaccttccgagggcagcgcaccgggtggctcagcgcctacgactggtgaagccggagaggcagctggtgctacaagcgccggcgctactgggcctgctaccagcggctctgagacccctggaacagacattcagatgactcagtctccgtcctccctgtctgcgagcgtgggcgaccgtgtgactattacctgtaaagcctcccaggacgtgtctatcggtgtggcatggtatcaacaaaagccgggtaaggcacctaaactgctgatctactccgcttcttaccgttacacgggcgttccgtcccgttttagcggttccggtagcggtactgattttaccctgactatttcctccctgcaaccagaagactttgcgacctattactgtcagcaatactatatttacccgtataccttcggccagggcactaaggttgaaattaaaggtgcaacgcctccggagactggtgctgaaactgagtccccgggcgagacgaccggtggctctgctgaatccgaaccaccgggcgaaggcgaggttcagctggtggagtctggcggcggtctggtacagccgggtggtagcctgcgtctgagctgcgcggcgtccggtttcactttcaccgattataccatggactgggttcgccaggcaccgggcaagggtctggaatgggtggcggacgtgaacccgaactccggtggttctatctacaaccagcgtttcaaaggtcgtttcacgctgagcgtagatcgtagcaaaaacactctgtacctgcagatgaactccctgcgcgcagaagacaccgcggtgtattactgtgcacgtaacctgggcccgtccttctatttcgactactggggtcaaggtactctggtaactgtttcctctggtggtggcggcagcgagttagttgtgacccaagagccgagcctgaccgttagcccgggtggtacggtcaccctgacgtgccgtagcagcaacggtgcggtcacgagcagcaactatgccaattgggtccagcagaaaccgggtcaagcaccgcgtggcctgatcggcggcaccaataaacgtgccccgggtactcctgcgcgtttctccggtagcctgctgggcggcaaagccgctctgaccctgagcggtgtccagccggaagatgaagcggtgtactactgcgcgctgtggtatccgaatctgtgggtttttggcggcggtaccaagctgaccgtattgggtgctacgccaccggagactggcgcagaaacggaaagcccgggtgagactacgggtggctctgcggagagcgaacctccgggtgagggtgaggtccaactgctggagtctggtggtggcattgttcaaccgggtggctcgttgaagctgagctgtgcagctagcggctttaccttcaacacctatgcgatgaattgggttcgtcaggcaccgggtaagggcctggaatgggtggcgcgtatccgctccaagtacaacaactacgcgacctactacgcggatagcgttaaagaccgcttcacgattagccgtgacgattccaagaatacggtgtatctgcaaatgaacaatctgaaaaccgaagataccgcggtgtattactgtgtgcgccacgaaaatttcggcaacagctacgtgagctggtttgcacattggggtcagggcaccctggttacggtgagctccggaacagccgaagccgctagcgcatccggtacgacaggagaggcaggggaggccgctggcgctaccagtgctggagccaccggtcctccaggcagccccgcggggagtcctacgagcactgaagaagggaccagtgagagcgccacacctgagagcggccctggaaccagcacggagccatccgaagggtcagcaccgggatctccggccggctctcccacgtcaaccgaagagggaacgagcactgagccctccgaggggagtgcgcctgggacatctacagagccatcagaaggcagtgctccgggtacttccgaaagcgcaactccggaatccggccctggttctgagcctgctacttccggctctgaaactccaggtagcgagccagcgacttctggttctgaaactccaggttcaccggcgggtagcccgacgagcacggaggaaggtacctctgagtcggccactcctgagtccggtccgggcacgagcaccgagccgagcgagggttcagccccgggtaccagcacggagccgtccgagggtagcgcaccgggttctccggcgggctcccctacgtctacggaagagggtacgtccactgaacctagcgagggcagcgcgccaggcaccagcactgaaccgagcgaaggcagcgcacctggcactagcgagtctgcgactccggagagcggtccgggtacgagcacggaaccaagcgaaggcagcgccccaggtacctctgaatctgctaccccagaatctggcccgggttccgagccagctacctctggttctgaaaccccaggtacttccactgaaccaagcgaaggtagcgctcctggcacttctactgaaccatccgaaggttccgctcctggtacgtctgaaagcgctacccctgaaagcggcccaggcacctctgaaagcgctactcctgagagcggtccaggctctccagcaggttctccaacctccactgaagaaggcacctctgagtctgctacccctgaatctggtcctggctccgaacctgctacctctggttccgaaactccaggtacctcggaatctgcgactccggaatctggcccgggcacgagcacggagccgtctgagggtagcgcaccaggtaccagcactgagccttctgagggctctgcaccgggtacctccacggaaccttcggaaggttctgcgccgggtacctccactgagccatccgagggttcagcaccaggtactagcacggaaccgtccgagggctctgcaccaggtacgagcaccgaaccgtcggagggtagcgctccaggtagcccagcgggctctccgacaagcaccgaagaaggcaccagcaccgagccgtccgaaggttccgcaccaggtacaagcgagagcgcgactcctgaatctggtccgggtagcgagcctgcaaccagcggttctgagacgccgggcacttccgaatctgcgaccccggagtccggtccaggttcagagccggcgacgagcggttcggaaacgccgggtacgtctgaatcagccacgccggagtctggtccgggtacctcgaccgaaccaagcgaaggttcggcaccgggtactagcgagagcgcaacccctgaaagcggtccgggcagcccggcaggttctccaaccagcaccgaagaaggttcccctgctggtagcccgacctctacggaggaaggtagccctgcaggttccccaacttctactgaggaaggtacttctgagtccgctaccccagaaagcggtcctggtacctccactgaaccgtctgaaggctctgcaccaggcgccgcagaaccagaggcg

SEQ ID NO: 968 - DNA, 3543 bp, Artificial Sequence
  Description of Artificial Sequence: Synthetic polynucleotide
caccatcatcaccatcactccccagcaggcagcccgaccagcaccgaggagggtacgagcgagtcggctactccagagagcggtccgggtacctctacggaaccgtccgaaggtagcgctccaggcacgtctgaaagcgcgacgccggaaagcggtccaggcagcgagccggcgacctccggtagcgaaacgcctggtacctcggagtcagcgactccggaaagcggtccgggtagcgaacctgcaacgagcggtagcgagactccaggcactagcgaatccgcaactccggagtcgggtccgggcacctctacggagcctagcgagggctcagcaccaggtagccctgcaggttccccgacgtcaaccgaggaaggtacaagcgaaagcgccacccctgagtcgggccctggcagcgaaccggcaactagcggcagcgagactccgggtaccagcgagtctgctacgccagagagcggcccaggttcgccagcgggttcgccgactagcacggaggagggcagcccagcgggtagcccgaccagcactgaggagggtacgtccaccgaaccgagcgaaggtagcgcaccaggtacctccgagtctgccacccctgaatccggtccaggtaccagcgaatcagccaccccggagtcgggtccaggtacgagcgaatctgctaccccggaatccggcccaggcagcgaacctgctactagcggcagcgaaacgccgggcagcgaacctgccacgtcaggcagcgagacgccgggttcccctgcaggctccccgaccagcactgaggagggcacctccaccgaaccatcagaaggtagcgcgcctggtacgtcaaccgaaccttccgagggcagcgcaccgggtggctcagcgcctacgactggtgaagccggagaggcagctggtgctacaagcgccggcgctactgggcctgctaccagcggctctgagacccctggaacagacattcagatgactcagtctccgtcctccctgtctgcgagcgtgggcgaccgtgtgactattacctgtaaagcctcccaggacgtgtctatcggtgtggcatggtatcaacaaaagccgggtaaggcacctaaactgctgatctactccgcttcttaccgttacacgggcgttccgtcccgttttagcggttccggtagcggtactgattttaccctgactatttcctccctgcaaccagaagactttgcgacctattactgtcagcaatactatatttacccgtataccttcggccagggcactaaggttgaaattaaaggtgcaacgcctccggagactggtgctgaaactgagtccccgggcgagacgaccggtggctctgctgaatccgaaccaccgggcgaaggcgaggttcagctggtggagtctggcggcggtctggtacagccgggtggtagcctgcgtctgagctgcgcggcgtccggtttcactttcaccgattataccatggactgggttcgccaggcaccgggcaagggtctggaatgggtggcggacgtgaacccgaactccggtggttctatctacaaccagcgtttcaaaggtcgtttcacgctgagcgtagatcgtagcaaaaacactctgtacctgcagatgaactccctgcgcgcagaagacaccgcggtgtattactgtgcacgtaacctgggcccgtccttctatttcgactactggggtcaaggtactctggtaactgtttcctctggtggtggcggcagcgagttagttgtgacccaagagccgagcctgaccgttagcccgggtggtacggtcaccctgacgtgccgtagcagcaacggtgcggtcacgagcagcaactatgccaattgggtccagcagaaaccgggtcaagcaccgcgtggcctgatcggcggcaccaataaacgtgccccgggtactcctgcgcgtttctccggtagcctgctgggcggcaaagccgctctgaccctgagcggtgtccagccggaagatgaagcggtgtactactgcgcgctgtggtatccgaatctgtgggtttttggcggcggtaccaagctgaccgtattgggtgctacgccaccggagactggcgcagaaacggaaagcccgggtgagactacgggtggctctgcggagagcgaacctccgggtgagggtgaggtccaactgctggagtctggtggtggcattgttcaaccgggtggctcgttgaagctgagctgtgcagctagcggctttaccttcaacacctatgcgatgaattgggttcgtcaggcaccgggtaagggcctggaatgggtggcgcgtatccgctccaagtacaacaactacgcgacctactacgcggatagcgttaaagaccgcttcacgattagccgtgacgattccaagaatacggtgtatctgcaaatgaacaatctgaaaaccgaagataccgcggtgtattactgtgtgcgccacgaaaatttcggcaacagctacgtgagctggtttgcacattggggtcagggcaccctggttacggtgagctccggaacagccgaagccgctagcgcatccggtacgacaggagaggcaggggaggccgctggcgctaccagtgctggagccaccggtcctccaggcagccccgcggggagtcctacgagcactgaagaagggaccagtgagagcgccacacctgagagcggccctggaaccagcacggagccatccgaagggtcagcaccgggatctccggccggctctcccacgtcaaccgaagagggaacgagcactgagccctccgaggggagtgcgcctgggacatctacagagccatcagaaggcagtgctccgggtacttccgaaagcgcaactccggaatccggccctggttctgagcctgctacttccggctctgaaactccaggtagcgagccagcgacttctggttctgaaactccaggttcaccggcgggtagcccgacgagcacggaggaaggtacctctgagtcggccactcctgagtccggtccgggcacgagcaccgagccgagcgagggttcagccccgggtaccagcacggagccgtccgagggtagcgcaccgggttctccggcgggctcccctacgtctacggaagagggtacgtccactgaacctagcgagggcagcgcgccaggcaccagcactgaaccgagcgaaggcagcgcacctggcactagcgagtctgcgactccggagagcggtccgggtacgagcacggaaccaagcgaaggcagcgccccaggtacctctgaatctgctaccccagaatctggcccgggttccgagccagctacctctggttctgaaaccccaggtacttccactgaaccaagcgaaggtagcgctcctggcacttctactgaaccatccgaaggttccgctcctggtacgtctgaaagcgctacccctgaaagcggcccaggcacctctgaaagcgctactcctgagagcggtccaggctctccagcaggcgccgcagaaccagaggcg

SEQ ID NO: 969 - DNA, 5229 bp, Artificial Sequence
  Description of Artificial Sequence: Synthetic polynucleotide
caccatcatcaccatcactccccagcaggcagcccgaccagcaccgaggagggtacgagcgagtcggctactccagagagcggtccgggtacctctacggaaccgtccgaaggtagcgctccaggcacgtctgaaagcgcgacgccggaaagcggtccaggcagcgagccggcgacctccggtagcgaaacgcctggtacctcggagtcagcgactccggaaagcggtccgggtagcgaacctgcaacgagcggtagcgagactccaggcactagcgaatccgcaactccggagtcgggtccgggcacctctacggagcctagcgagggctcagcaccaggtagccctgcaggttccccgacgtcaaccgaggaaggtacaagcgaaagcgccacccctgagtcgggccctggcagcgaaccggcaactagcggcagcgagactccgggtaccagcgagtctgctacgccagagagcggcccaggttcgccagcgggttcgccgactagcacggaggagggcagcccagcgggtagcccgaccagcactgaggagggtacgtccaccgaaccgagcgaaggtagcgcaccaggtacctccgagtctgccacccctgaatccggtccaggtaccagcgaatcagccaccccggagtcgggtccaggtacgagcgaatctgctaccccggaatccggcccaggcagcgaacctgctactagcggcagcgaaacgccgggcagcgaacctgccacgtcaggcagcgagacgccgggttcccctgcaggctccccgaccagcactgaggagggcacctccaccgaaccatcagaaggtagcgcgcctggtacgtcaaccgaaccttccgagggcagcgcaccgggtggctcagcgcctgaggcaggtcgttctgctaaccataccccagcggggctgactgggcctgctacctcaggctccgaaaccccgggcaccgacatccaaatgacccagagcccgagcagcctgagcgcgagcgtgggcgaccgtgttaccatcacctgccaagcgagccaagacatcagcaactacctgaactggtatcagcaaaagccgggcaaagcgccgaagctgctgatctacgacgcgagcaacctggaaaccggtgtgccgagccgtttcagcggtagcggtagcggtaccgatttcacctttaccatcagcagcctgcaaccggaggacatcgcgacctatttctgccagcactttgatcacctgccgctggcgtttggtggcggtaccaaagttgagattaaaggtgcaacgcctccggagactggtgctgaaactgagtccccgggcgagacgaccggtggctctgctgaatccgaaccaccgggcgaaggccaggtgcaactgcaggaaagcggtccgggcctggttaaaccgagcgaaaccctgagcctgacctgcaccgtgagcggcggtagcgttagcagcggtgactactattggacctggatccgtcaaagcccgggtaaaggcctggagtggatcggtcacatttactatagcggcaacaccaactacaacccgagcctgaagagccgtctgaccatcagcattgacaccagcaaaacccagttcagcctgaaactgagcagcgtgaccgcggcggataccgcgatttactattgcgttcgtgatcgtgttaccggcgcgttcgacatctggggtcagggcaccatggttaccgttagcagcggtggtggcggcagcgagttagttgtgacccaagagccgagcctgaccgttagcccgggtggtacggtcaccctgacgtgccgtagcagcaacggtgcggtcacgagcagcaactatgccaattgggtccagcagaaaccgggtcaagcaccgcgtggcctgatcggcggcaccaataaacgtgccccgggtactcctgcgcgtttctccggtagcctgctgggcggcaaagccgctctgaccctgagcggtgtccagccggaagatgaagcggtgtactactgcgcgctgtggtatccgaatctgtgggtttttggcggcggtaccaagctgaccgtattgggtgctacgccaccggagactggcgcagaaacggaaagcccgggtgagactacgggtggctctgcggagagcgaacctccgggtgagggtgaggtccaactgctggagtctggtggtggcattgttcaaccgggtggctcgttgaagctgagctgtgcagctagcggctttaccttcaacacctatgcgatgaattgggttcgtcaggcaccgggtaagggcctggaatgggtggcgcgtatccgctccaagtacaacaactacgcgacctactacgcggatagcgttaaagaccgcttcacgattagccgtgacgattccaagaatacggtgtatctgcaaatgaacaatctgaaaaccgaagataccgcggtgtattactgtgtgcgccacgaaaatttcggcaacagctacgtgagctggtttgcacattggggtcagggcaccctggttacggtgagctccggcaccgccgaagcagctagcgcctctggcgaggcaggtcgttctgctaaccataccccagcggggctgactgggcctccaggtagcccagctggtagcccaacctctaccgaagaaggtacctctgaatccgctactccagaatccggtcctggtactagcactgagccaagcgaaggttctgctccaggctccccggcaggtagccctacctctaccgaagagggcactagcaccgaaccatctgagggttccgctcctggcacctccactgaaccgtccgaaggcagtgctccgggtacttccgaaagcgcaactccggaatccggccctggttctgagcctgctacttccggctctgaaactccaggtagcgagccagcgacttctggttctgaaactccaggttcaccggcgggtagcccgacgagcacggaggaaggtacctctgagtcggccactcctgagtccggtccgggcacgagcaccgagccgagcgagggttcagccccgggtaccagcacggagccgtccgagggtagcgcaccgggttctccggcgggctcccctacgtctacggaagagggtacgtccactgaacctagcgagggcagcgcgccaggcaccagcactgaaccgagcgaaggcagcgcacctggcactagcgagtctgcgactccggagagcggtccgggtacgagcacggaaccaagcgaaggcagcgccccaggtacctctgaatctgctaccccagaatctggcccgggttccgagccagctacctctggttctgaaaccccaggtacttccactgaaccaagcgaaggtagcgctcctggcacttctactgaaccatccgaaggttccgctcctggtacgtctgaaagcgctacccctgaaagcggcccaggcacctctgaaagcgctactcctgagagcggtccaggctctccagcaggttctccaacctccactgaagaaggcacctctgagtctgctacccctgaatctggtcctggctccgaacctgctacctctggttccgaaactccaggtacctcggaatctgcgactccggaatctggcccgggcacgagcacggagccgtctgagggtagcgcaccaggtaccagcactgagccttctgagggctctgcaccgggtacctccacggaaccttcggaaggttctgcgccgggtacctccactgagccatccgagggttcagcaccaggtactagcacggaaccgtccgagggctctgcaccaggtacgagcaccgaaccgtcggagggtagcgctccaggtagcccagcgggctctccgacaagcaccgaagaaggcaccagcaccgagccgtccgaaggttccgcaccaggtacaagcgagagcgcgactcctgaatctggtccgggtagcgagcctgcaaccagcggttctgagacgccgggcacttccgaatctgcgaccccggagtccggtccaggttcagagccggcgacgagcggttcggaaacgccgggtacgtctgaatcagccacgccggagtctggtccgggtacctcgaccgaaccaagcgaaggttcggcaccgggtactagcgagagcgcaacccctgaaagcggtccgggcagcccggcaggttctccaaccagcaccgaagaaggttcccctgctggtagcccgacctctacggaggaaggtagccctgcaggttccccaacttctactgaggaaggtacttctgagtccgctaccccagaaagcggtcctggtacctccactgaaccgtctgaaggctctgcaccaggcacttctgagtctgctactccagaaagcggcccaggttctgaaccagcaacttctggctctgagactccaggcacttctgagtccgcaacgcctgaatccggtcctggttctgaaccagctacttccggcagcgaaaccccaggtacctctgagtctgcgactccagagtctggtcctggtacttccactgagcctagcgagggttccgcaccaggttctccggctggtagcccgaccagcacggaggagggtacgtctgaatctgcaacgccggaatcgggcccaggttcggagcctgcaacgtctggcagcgaaaccccgggtacctccgaatctgctacaccggaaagcggtcctggcagccctgctggttctccaacctctaccgaggagggttcaccggcaggtagcccgactagcactgaagaaggtactagcacggagccgagcgagggtagtgctccgggtacgagcgagagcgcaacgccagagagcggtccaggcaccagcgaatcggccacccctgagagcggcccaggtacttctgagagcgccactcctgaatccggccctggtagcgagccggcaacctccggctcagaaactcctggttcggaaccagcgaccagcggttctgaaactccgggtagcccggcaggcagcccaacgagcaccgaagagggtaccagcacggaaccgagcgagggttctgccccgggtacttccaccgagccatcggagggctctgcacctggtagcgaacctgcgacgtctggttctgaaacgccgggtaccagcgaaagcgctaccccagaatccggtccgggcactagcaccgagccatcggagggcgccgcagaaccagaggcg

SEQ ID NO: 970 - DNA, 5247 bp, Artificial Sequence
  Description of Artificial Sequence: Synthetic polynucleotide
caccatcatcaccatcactccccagcaggcagcccgaccagcaccgaggagggtacgagcgagtcggctactccagagagcggtccgggtacctctacggaaccgtccgaaggtagcgctccaggcacgtctgaaagcgcgacgccggaaagcggtccaggcagcgagccggcgacctccggtagcgaaacgcctggtacctcggagtcagcgactccggaaagcggtccgggtagcgaacctgcaacgagcggtagcgagactccaggcactagcgaatccgcaactccggagtcgggtccgggcacctctacggagcctagcgagggctcagcaccaggtagccctgcaggttccccgacgtcaaccgaggaaggtacaagcgaaagcgccacccctgagtcgggccctggcagcgaaccggcaactagcggcagcgagactccgggtaccagcgagtctgctacgccagagagcggcccaggttcgccagcgggttcgccgactagcacggaggagggcagcccagcgggtagcccgaccagcactgaggagggtacgtccaccgaaccgagcgaaggtagcgcaccaggtacctccgagtctgccacccctgaatccggtccaggtaccagcgaatcagccaccccggagtcgggtccaggtacgagcgaatctgctaccccggaatccggcccaggcagcgaacctgctactagcggcagcgaaacgccgggcagcgaacctgccacgtcaggcagcgagacgccgggttcccctgcaggctccccgaccagcactgaggagggcacctccaccgaaccatcagaaggtagcgcgcctggtacgtcaaccgaaccttccgagggcagcgcaccgggtggctcagcgcctactacaggggaggcgggggaagcagcaggggcgacttctgctggggctaccggccccgctacctcaggctccgaaaccccgggcaccgacatccaaatgacccagagcccgagcagcctgagcgcgagcgtgggcgaccgtgttaccatcacctgccaagcgagccaagacatcagcaactacctgaactggtatcagcaaaagccgggcaaagcgccgaagctgctgatctacgacgcgagcaacctggaaaccggtgtgccgagccgtttcagcggtagcggtagcggtaccgatttcacctttaccatcagcagcctgcaaccggaggacatcgcgacctatttctgccagcactttgatcacctgccgctggcgtttggtggcggtaccaaagttgagattaaaggtgcaacgcctccggagactggtgctgaaactgagtccccgggcgagacgaccggtggctctgctgaatccgaaccaccgggcgaaggccaggtgcaactgcaggaaagcggtccgggcctggttaaaccgagcgaaaccctgagcctgacctgcaccgtgagcggcggtagcgttagcagcggtgactactattggacctggatccgtcaaagcccgggtaaaggcctggagtggatcggtcacatttactatagcggcaacaccaactacaacccgagcctgaagagccgtctgaccatcagcattgacaccagcaaaacccagttcagcctgaaactgagcagcgtgaccgcggcggataccgcgatttactattgcgttcgtgatcgtgttaccggcgcgttcgacatctggggtcagggcaccatggttaccgttagcagcggtggtggcggcagcgagttagttgtgacccaagagccgagcctgaccgttagcccgggtggtacggtcaccctgacgtgccgtagcagcaccggtgcggtcacgaccagcaactatgccaattgggtccagcagaaaccgggtcaagcaccgcgtggcctgatcggcggcaccaataaacgtgccccgggtactcctgcgcgtttctccggtagcctgctgggcggcaaagccgctctgaccctgagcggtgtccagccggaagatgaagcggagtactactgcgcgctgtggtattccaatctgtgggtttttggcggcggtaccaagctgaccgtattgggtgctacgccaccggagactggcgcagaaacggaaagcccgggtgagactacgggtggctctgcggagagcgaacctccgggtgagggtgaggtccaactgctggagtctggtggtggcctggttcaaccgggtggctcgttgaagctgagctgtgcagctagcggctttaccttcaacacctatgcgatgaattgggttcgtcaggcaccgggtaagggcctggaatgggtggcgcgtatccgctccaagtacaacaactacgcgacctactacgcggatagcgttaaagaccgcttcacgattagccgtgacgattccaagaatacggcatatctgcaaatgaacaatctgaaaaccgaagataccgcggtgtattactgtgtgcgccacggcaatttcggcaacagctacgtgagctggtttgcatattggggtcagggcaccctggttacggtgagctccggcaccgccgaagcagctagcgcctctggcacgactggtgaagccggagaggcagctggcgcgacctcagcgggggctactgggcctccaggtagcccagctggtagcccaacctctaccgaagaaggtacctctgaatccgctactccagaatccggtcctggtactagcactgagccaagcgaaggttctgctccaggctccccggcaggtagccctacctctaccgaagagggcactagcaccgaaccatctgagggttccgctcctggcacctccactgaaccgtccgaaggcagtgctccgggtacttccgaaagcgcaactccggaatccggccctggttctgagcctgctacttccggctctgaaactccaggtagcgagccagcgacttctggttctgaaactccaggttcaccggcgggtagcccgacgagcacggaggaaggtacctctgagtcggccactcctgagtccggtccgggcacgagcaccgagccgagcgagggttcagccccgggtaccagcacggagccgtccgagggtagcgcaccgggttctccggcgggctcccctacgtctacggaagagggtacgtccactgaacctagcgagggcagcgcgccaggcaccagcactgaaccgagcgaaggcagcgcacctggcactagcgagtctgcgactccggagagcggtccgggtacgagcacggaaccaagcgaaggcagcgccccaggtacctctgaatctgctaccccagaatctggcccgggttccgagccagctacctctggttctgaaaccccaggtacttccactgaaccaagcgaaggtagcgctcctggcacttctactgaaccatccgaaggttccgctcctggtacgtctgaaagcgctacccctgaaagcggcccaggcacctctgaaagcgctactcctgagagcggtccaggctctccagcaggttctccaacctccactgaagaaggcacctctgagtctgctacccctgaatctggtcctggctccgaacctgctacctctggttccgaaactccaggtacctcggaatctgcgactccggaatctggcccgggcacgagcacggagccgtctgagggtagcgcaccaggtaccagcactgagccttctgagggctctgcaccgggtacctccacggaaccttcggaaggttctgcgccgggtacctccactgagccatccgagggttcagcaccaggtactagcacggaaccgtccgagggctctgcaccaggtacgagcaccgaaccgtcggagggtagcgctccaggtagcccagcgggctctccgacaagcaccgaagaaggcaccagcaccgagccgtccgaaggttccgcaccaggtacaagcgagagcgcgactcctgaatctggtccgggtagcgagcctgcaaccagcggttctgagacgccgggcacttccgaatctgcgaccccggagtccggtccaggttcagagccggcgacgagcggttcggaaacgccgggtacgtctgaatcagccacgccggagtctggtccgggtacctcgaccgaaccaagcgaaggttcggcaccgggtactagcgagagcgcaacccctgaaagcggtccgggcagcccggcaggttctccaaccagcaccgaagaaggttcccctgctggtagcccgacctctacggaggaaggtagccctgcaggttccccaacttctactgaggaaggtacttctgagtccgctaccccagaaagcggtcctggtacctccactgaaccgtctgaaggctctgcaccaggcacttctgagtctgctactccagaaagcggcccaggttctgaaccagcaacttctggctctgagactccaggcacttctgagtccgcaacgcctgaatccggtcctggttctgaaccagctacttccggcagcgaaaccccaggtacctctgagtctgcgactccagagtctggtcctggtacttccactgagcctagcgagggttccgcaccaggttctccggctggtagcccgaccagcacggaggagggtacgtctgaatctgcaacgccggaatcgggcccaggttcggagcctgcaacgtctggcagcgaaaccccgggtacctccgaatctgctacaccggaaagcggtcctggcagccctgctggttctccaacctctaccgaggagggttcaccggcaggtagcccgactagcactgaagaaggtactagcacggagccgagcgagggtagtgctccgggtacgagcgagagcgcaacgccagagagcggtccaggcaccagcgaatcggccacccctgagagcggcccaggtacttctgagagcgccactcctgaatccggccctggtagcgagccggcaacctccggctcagaaactcctggttcggaaccagcgaccagcggttctgaaactccgggtagcccggcaggcagcccaacgagcaccgaagagggtaccagcacggaaccgagcgagggttctgccccgggtacttccaccgaaccatcggagggctctgcacctggtagcgaacctgcgacgtctggttctgaaacgccgggtaccagcgaaagcgctaccccagaatccggtccgggcactagcaccgagccatcggagggcgccgcagaaccagaggcg

SEQ ID NO: 971 - DNA, 4269 bp, Artificial Sequence
  Description of Artificial Sequence: Synthetic polynucleotide
gacattcagatgactcagtctccgtcctccctgtctgcgagcgtgggcgaccgtgtgactattacctgtaaagcctcccaggacgtgtctatcggtgtggcatggtatcaacaaaagccgggtaaggcacctaaactgctgatctactccgcttcttaccgttacacgggcgttccgtcccgttttagcggttccggtagcggtactgattttaccctgactatttcctccctgcaaccagaagactttgcgacctattactgtcagcaatactatatttacccgtataccttcggccagggcactaaggttgaaattaaaggtgcaacgcctccggagactggtgctgaaactgagtccccgggcgagacgaccggtggctctgctgaatccgaaccaccgggcgaaggcgaggttcagctggtggagtctggcggcggtctggtacagccgggtggtagcctgcgtctgagctgcgcggcgtccggtttcactttcaccgattataccatggactgggttcgccaggcaccgggcaagggtctggaatgggtggcggacgtgaacccgaactccggtggttctatctacaaccagcgtttcaaaggtcgtttcacgctgagcgtagatcgtagcaaaaacactctgtacctgcagatgaactccctgcgcgcagaagacaccgcggtgtattactgtgcacgtaacctgggcccgtccttctatttcgactattggggccagggcactctggttaccgttagctccggtggtggcggcagcgaactggtcgtcacgcaggagccgtcccttaccgtttcaccaggtggaacagtgactctgacgtgtcgctcctccactggggcggttacaacttccaattatgctaattgggtccagcagaagccgggccaagcccctcgcgggttgattggcggcaccaacaaacgtgctccagggacacctgcccgtttttcgggctccttattggggggcaaagctgcactgacgttgtctggagttcagccggaggatgaggcagagtattactgcgcattgtggtattctaatttatgggtttttggaggcggcacaaagctgaccgtcctgggtgcgaccccgccggaaaccggtgcggaaaccgaaagcccgggtgaaaccaccggtggcagcgcggagagcgaaccgccgggtgaaggtgaggttcagttgttggaaagcgggggcgggcttgtccaacctggaggttcattaaaattgagctgtgcagcctccggattcacctttaacacgtatgcaatgaactgggtccgtcaagcgcccggtaaggggctggagtgggtagctcgcatccgctcgaagtataataattacgcaacctactacgcagacagtgtcaaagatcgcttcactatctcacgcgacgacagtaagaacacggcctacttacagatgaacaatcttaaaacggaggacaccgctgtctactactgcgtgcgccacgggaatttcggtaactcttatgtaagttggttcgcatattggggacaaggtacgttggtaaccgtatccagcggcaccgccgaagcagctagcgcctctggcctgtcaggtcgttctgataaccattccccactgggtctggctgggtctccaggtagcccagctggtagcccaacctctaccgaagaaggtacctctgaatccgctactccagaatccggtcctggtactagcactgagccaagcgaaggttctgctccaggctccccggcaggtagccctacctctaccgaagagggcactagcaccgaaccatctgagggttccgctcctggcacctccactgaaccgtccgaaggcagtgctccgggtacttccgaaagcgcaactccggaatccggccctggttctgagcctgctacttccggctctgaaactccaggtagcgagccagcgacttctggttctgaaactccaggttcaccggcgggtagcccgacgagcacggaggaaggtacctctgagtcggccactcctgagtccggtccgggcacgagcaccgagccgagcgagggttcagccccgggtaccagcacggagccgtccgagggtagcgcaccgggttctccggcgggctcccctacgtctacggaagagggtacgtccactgaacctagcgagggcagcgcgccaggcaccagcactgaaccgagcgaaggcagcgcacctggcactagcgagtctgcgactccggagagcggtccgggtacgagcacggaaccaagcgaaggcagcgccccaggtacctctgaatctgctaccccagaatctggcccgggttccgagccagctacctctggttctgaaaccccaggtacttccactgaaccaagcgaaggtagcgctcctggcacttctactgaaccatccgaaggttccgctcctggtacgtctgaaagcgctacccctgaaagcggcccaggcacctctgaaagcgctactcctgagagcggtccaggctctccagcaggttctccaacctccactgaagaaggcacctctgagtctgctacccctgaatctggtcctggctccgaacctgctacctctggttccgaaactccaggtacctcggaatctgcgactccggaatctggcccgggcacgagcacggagccgtctgagggtagcgcaccaggtaccagcactgagccttctgagggctctgcaccgggtacctccacggaaccttcggaaggttctgcgccgggtacctccactgagccatccgagggttcagcaccaggtactagcacggaaccgtccgagggctctgcaccaggtacgagcaccgaaccgtcggagggtagcgctccaggtagcccagcgggctctccgacaagcaccgaagaaggcaccagcaccgagccgtccgaaggttccgcaccaggtacaagcgagagcgcgactcctgaatctggtccgggtagcgagcctgcaaccagcggttctgagacgccgggcacttccgaatctgcgaccccggagtccggtccaggttcagagccggcgacgagcggttcggaaacgccgggtacgtctgaatcagccacgccggagtctggtccgggtacctcgaccgaaccaagcgaaggttcggcaccgggtactagcgagagcgcaacccctgaaagcggtccgggcagcccggcaggttctccaaccagcaccgaagaaggttcccctgctggtagcccgacctctacggaggaaggtagccctgcaggttccccaacttctactgaggaaggtacttctgagtccgctaccccagaaagcggtcctggtacctccactgaaccgtctgaaggctctgcaccaggcacttctgagtctgctactccagaaagcggcccaggttctgaaccagcaacttctggctctgagactccaggcacttctgagtccgcaacgcctgaatccggtcctggttctgaaccagctacttccggcagcgaaaccccaggtacctctgagtctgcgactccagagtctggtcctggtacttccactgagcctagcgagggttccgcaccaggttctccggctggtagcccgaccagcacggaggagggtacgtctgaatctgcaacgccggaatcgggcccaggttcggagcctgcaacgtctggcagcgaaaccccgggtacctccgaatctgctacaccggaaagcggtcctggcagccctgctggttctccaacctctaccgaggagggttcaccggcaggtagcccgactagcactgaagaaggtactagcacggagccgagcgagggtagtgctccgggtacgagcgagagcgcaacgccagagagcggtccaggcaccagcgaatcggccacccctgagagcggcccaggtacttctgagagcgccactcctgaatccggccctggtagcgagccggcaacctccggctcagaaactcctggttcggaaccagcgaccagcggttctgaaactccgggtagcccggcaggcagcccaacgagcaccgaagagggtaccagcacggaaccgagcgagggttctgccccgggtacttccaccgaaccatcggagggctctgcacctggtagcgaacctgcgacgtctggttctgaaacgccgggtaccagcgaaagcgctaccccagaatccggtccgggcactagcaccgagccatcggagggctccgcaccaggtcaccatcatcaccatcac

SEQ ID NO: 972 - protein, 1745 aa, Artificial Sequence
  Description of Artificial Sequence: Synthetic polypeptide
SPAGSPTSTEEGTSESATPESGPGTSTEPSEGSAPGTSESATPESGPGSEPATSGSETPGTSESATPESGPGSEPATSGSETPGTSESATPESGPGTSTEPSEGSAPGSPAGSPTSTEEGTSESATPESGPGSEPATSGSETPGTSESATPESGPGSPAGSPTSTEEGSPAGSPTSTEEGTSTEPSEGSAPGTSESATPESGPGTSESATPESGPGTSESATPESGPGSEPATSGSETPGSEPATSGSETPGSPAGSPTSTEEGTSTEPSEGSAPGTSTEPSEGSAPGGSAPTTGEAGEAAGATSAGATGPATSGSETPGTDIQMTQSPSSLSASVGDRVTITCRSTKSLLHSNGITYLYWYQQKPGKAPKLLIYQMSNLASGVPSRFSSSGSGTDFTLTISSLQPEDFATYYCAQNLEIPRTFGQGTKVEIKGATPPETGAETESPGETTGGSAESEPPGEGQVQLVQSGPGLVQPGGSVRISCAASGYTFTNYGMNWVKQAPGKGLEWMGWINTYTGESTYADSFKGRFTFSLDTSASAAYLQINSLRAEDTAVYYCARFAIKGDYWGQGTLLTVSSGGGGSDIQMTQSPSSLSASVGDRVTITCRASQDIRNYLNWYQQKPGKAPKLLIYYTSRLESGVPSRFSGSGSGTDYTLTISSLQPEDFATYYCQQGNTLPWTFGQGTKVEIKGATPPETGAETESPGETTGGSAESEPPGEGEVQLVESGGGLVQPGGSLRLSCAASGYSFTGYTMNWVRQAPGKGLEWVALINPYKGVSTYNQKFKDRFTISVDKSKNTAYLQMNSLRAEDTAVYYCARSGYYGDSDWYFDVWGQGTLVTVSSGTAEAASASGTTGEAGEAAGATSAGATGPSPGSPAGSPTSTEEGTSESATPESGPGTSTEPSEGSAPGSPAGSPTSTEEGTSTEPSEGSAPGTSTEPSEGSAPGTSESATPESGPGSEPATSGSETPGSEPATSGSETPGSPAGSPTSTEEGTSESATPESGPGTSTEPSEGSAPGTSTEPSEGSAPGSPAGSPTSTEEGTSTEPSEGSAPGTSTEPSEGSAPGTSESATPESGPGTSTEPSEGSAPGTSESATPESGPGSEPATSGSETPGTSTEPSEGSAPGTSTEPSEGSAPGTSESATPESGPGTSESATPESGPGSPAGSPTSTEEGTSESATPESGPGSEPATSGSETPGTSESATPESGPGTSTEPSEGSAPGTSTEPSEGSAPGTSTEPSEGSAPGTSTEPSEGSAPGTSTEPSEGSAPGTSTEPSEGSAPGSPAGSPTSTEEGTSTEPSEGSAPGTSESATPESGPGSEPATSGSETPGTSESATPESGPGSEPATSGSETPGTSESATPESGPGTSTEPSEGSAPGTSESATPESGPGSPAGSPTSTEEGSPAGSPTSTEEGSPAGSPTSTEEGTSESATPESGPGTSTEPSEGSAPGTSESATPESGPGSEPATSGSETPGTSESATPESGPGSEPATSGSETPGTSESATPESGPGTSTEPSEGSAPGSPAGSPTSTEEGTSESATPESGPGSEPATSGSETPGTSESATPESGPGSPAGSPTSTEEGSPAGSPTSTEEGTSTEPSEGSAPGTSESATPESGPGTSESATPESGPGTSESATPESGPGSEPATSGSETPGSEPATSGSETPGSPAGSPTSTEEGTSTEPSEGSAPGTSTEPSEGSAPGSEPATSGSETPGTSESATPESGPGTSTEPSEGSAPGHHHHHH

SEQ ID NO: 973 - protein, 1421 aa, Artificial Sequence
  Description of Artificial Sequence: Synthetic polypeptide
DIQMTQSPSSLSASVGDRVTITCRSTKSLLHSNGITYLYWYQQKPGKAPKLLIYQMSNLASGVPSRFSSSGSGTDFTLTISSLQPEDFATYYCAQNLEIPRTFGQGTKVEIKGATPPETGAETESPGETTGGSAESEPPGEGQVQLVQSGPGLVQPGGSVRISCAASGYTFTNYGMNWVKQAPGKGLEWMGWINTYTGESTYADSFKGRFTFSLDTSASAAYLQINSLRAEDTAVYYCARFAIKGDYWGQGTLLTVSSGGGGSELVVTQEPSLTVSPGGTVTLTCRSSTGAVTTSNYANWVQQKPGQAPRGLIGGTNKRAPGTPARFSGSLLGGKAALTLSGVQPEDEAEYYCALWYSNLWVFGGGTKLTVLGATPPETGAETESPGETTGGSAESEPPGEGEVQLLESGGGLVQPGGSLKLSCAASGFTFNTYAMNWVRQAPGKGLEWVARIRSKYNNYATYYADSVKDRFTISRDDSKNTAYLQMNNLKTEDTAVYYCVRHGNFGNSYVSWFAYWGQGTLVTVSSGTAEAASASGEAGRSANHTPAGLTGPPGSPAGSPTSTEEGTSESATPESGPGTSTEPSEGSAPGSPAGSPTSTEEGTSTEPSEGSAPGTSTEPSEGSAPGTSESATPESGPGSEPATSGSETPGSEPATSGSETPGSPAGSPTSTEEGTSESATPESGPGTSTEPSEGSAPGTSTEPSEGSAPGSPAGSPTSTEEGTSTEPSEGSAPGTSTEPSEGSAPGTSESATPESGPGTSTEPSEGSAPGTSESATPESGPGSEPATSGSETPGTSTEPSEGSAPGTSTEPSEGSAPGTSESATPESGPGTSESATPESGPGSPAGSPTSTEEGTSESATPESGPGSEPATSGSETPGTSESATPESGPGTSTEPSEGSAPGTSTEPSEGSAPGTSTEPSEGSAPGTSTEPSEGSAPGTSTEPSEGSAPGTSTEPSEGSAPGSPAGSPTSTEEGTSTEPSEGSAPGTSESATPESGPGSEPATSGSETPGTSESATPESGPGSEPATSGSETPGTSESATPESGPGTSTEPSEGSAPGTSESATPESGPGSPAGSPTSTEEGSPAGSPTSTEEGSPAGSPTSTEEGTSESATPESGPGTSTEPSEGSAPGTSESATPESGPGSEPATSGSETPGTSESATPESGPGSEPATSGSETPGTSESATPESGPGTSTEPSEGSAPGSPAGSPTSTEEGTSESATPESGPGSEPATSGSETPGTSESATPESGPGSPAGSPTSTEEGSPAGSPTSTEEGTSTEPSEGSAPGTSESATPESGPGTSESATPESGPGTSESATPESGPGSEPATSGSETPGSEPATSGSETPGSPAGSPTSTEEGTSTEPSEGSAPGTSTEPSEGSAPGSEPATSGSETPGTSESATPESGPGTSTEPSEGAAEPEA

SEQ ID NO: 974 - protein, 1749 aa, Artificial Sequence
  Description of Artificial Sequence: Synthetic polypeptide
HHHHHHSPAGSPTSTEEGTSESATPESGPGTSTEPSEGSAPGTSESATPESGPGSEPATSGSETPGTSESATPESGPGSEPATSGSETPGTSESATPESGPGTSTEPSEGSAPGSPAGSPTSTEEGTSESATPESGPGSEPATSGSETPGTSESATPESGPGSPAGSPTSTEEGSPAGSPTSTEEGTSTEPSEGSAPGTSESATPESGPGTSESATPESGPGTSESATPESGPGSEPATSGSETPGSEPATSGSETPGSPAGSPTSTEEGTSTEPSEGSAPGTSTEPSEGSAPGGSAPTTGEAGEAAGATSAGATGPATSGSETPGTDIQMTQSPSSLSASVGDRVTITCKASQDVSIGVAWYQQKPGKAPKLLIYSASYRYTGVPSRFSGSGSGTDFTLTISSLQPEDFATYYCQQYYIYPYTFGQGTKVEIKGATPPETGAETESPGETTGGSAESEPPGEGEVQLVESGGGLVQPGGSLRLSCAASGFTFTDYTMDWVRQAPGKGLEWVADVNPNSGGSIYNQRFKGRFTLSVDRSKNTLYLQMNSLRAEDTAVYYCARNLGPSFYFDYWGQGTLVTVSSGGGGSELVVTQEPSLTVSPGGTVTLTCRSSNGAVTSSNYANWVQQKPGQAPRGLIGGTNKRAPGTPARFSGSLLGGKAALTLSGVQPEDEAVYYCALWYPNLWVFGGGTKLTVLGATPPETGAETESPGETTGGSAESEPPGEGEVQLLESGGGIVQPGGSLKLSCAASGFTFNTYAMNWVRQAPGKGLEWVARIRSKYNNYATYYADSVKDRFTISRDDSKNTVYLQMNNLKTEDTAVYYCVRHENFGNSYVSWFAHWGQGTLVTVSSGTAEAASASGTTGEAGEAAGATSAGATGPPGSPAGSPTSTEEGTSESATPESGPGTSTEPSEGSAPGSPAGSPTSTEEGTSTEPSEGSAPGTSTEPSEGSAPGTSESATPESGPGSEPATSGSETPGSEPATSGSETPGSPAGSPTSTEEGTSESATPESGPGTSTEPSEGSAPGTSTEPSEGSAPGSPAGSPTSTEEGTSTEPSEGSAPGTSTEPSEGSAPGTSESATPESGPGTSTEPSEGSAPGTSESATPESGPGSEPATSGSETPGTSTEPSEGSAPGTSTEPSEGSAPGTSESATPESGPGTSESATPESGPGSPAGSPTSTEEGTSESATPESGPGSEPATSGSETPGTSESATPESGPGTSTEPSEGSAPGTSTEPSEGSAPGTSTEPSEGSAPGTSTEPSEGSAPGTSTEPSEGSAPGTSTEPSEGSAPGSPAGSPTSTEEGTSTEPSEGSAPGTSESATPESGPGSEPATSGSETPGTSESATPESGPGSEPATSGSETPGTSESATPESGPGTSTEPSEGSAPGTSESATPESGPGSPAGSPTSTEEGSPAGSPTSTEEGSPAGSPTSTEEGTSESATPESGPGTSTEPSEGSAPGTSESATPESGPGSEPATSGSETPGTSESATPESGPGSEPATSGSETPGTSESATPESGPGTSTEPSEGSAPGSPAGSPTSTEEGTSESATPESGPGSEPATSGSETPGTSESATPESGPGSPAGSPTSTEEGSPAGSPTSTEEGTSTEPSEGSAPGTSESATPESGPGTSESATPESGPGTSESATPESGPGSEPATSGSETPGSEPATSGSETPGSPAGSPTSTEEGTSTEPSEGSAPGTSTEPSEGSAPGSEPATSGSETPGTSESATPESGPGTSTEPSEGAAEPEA

SEQ ID NO: 975 - skipped

SEQ ID NO: 976 - protein, 1715 aa, Artificial Sequence
  Description of Artificial Sequence: Synthetic polypeptide
HHHHHHSPAGSPTSTEEGTSESATPESGPGTSTEPSEGSAPGTSESATPESGPGSEPATSGSETPGTSESATPESGPGSEPATSGSETPGTSESATPESGPGTSTEPSEGSAPGSPAGSPTSTEEGTSESATPESGPGSEPATSGSETPGTSESATPESGPGSPAGSPTSTEEGSPAGSPTSTEEGTSTEPSEGSAPGTSESATPESGPGTSESATPESGPGTSESATPESGPGSEPATSGSETPGSEPATSGSETPGSPAGSPTSTEEGTSTEPSEGSAPGTSTEPSEGSAPGGSAPTTGEAGEAAGATSAGATGPATSGSETPGTDIQMTQSPSSLPASLGDRVTINCQASQDISNYLNWYQQKPGKAPKLLIYYTNKLADGVPSRFSGSGSGRDSSFTISSLESEDIGSYYCQQYYNYPWTFGPGTKLEIKGGGGSDIQMTQSPSSLSASVGDRVTITCRSTKSLLHSNGITYLYWYQQKPGKAPKLLIYQMSNLASGVPSRFSSSGSGTDFTLTISSLQPEDFATYYCAQNLEIPRTFGQGTKVEIKGATPPETGAETESPGETTGGSAESEPPGEGQVQLVQSGPGLVQPGGSVRISCAASGYTFTNYGMNWVKQAPGKGLEWMGWINTYTGESTYADSFKGRFTFSLDTSASAAYLQINSLRAEDTAVYYCARFAIKGDYWGQGTLLTVSSGGGGSEVQLVESGGGLVQPGKSLKLSCEASGFTFSGYGMHWVRQAPGRGLESVAYITSSSINIKYADAVKGRFTVSRDNAKNLLFLQMNILKSEDTAMYYCARFDWDKNYWGQGTMVTVSSGTAEAASASGTTGEAGEAAGATSAGATGPPGSPAGSPTSTEEGTSESATPESGPGTSTEPSEGSAPGSPAGSPTSTEEGTSTEPSEGSAPGTSTEPSEGSAPGTSESATPESGPGSEPATSGSETPGSEPATSGSETPGSPAGSPTSTEEGTSESATPESGPGTSTEPSEGSAPGTSTEPSEGSAPGSPAGSPTSTEEGTSTEPSEGSAPGTSTEPSEGSAPGTSESATPESGPGTSTEPSEGSAPGTSESATPESGPGSEPATSGSETPGTSTEPSEGSAPGTSTEPSEGSAPGTSESATPESGPGTSESATPESGPGSPAGSPTSTEEGTSESATPESGPGSEPATSGSETPGTSESATPESGPGTSTEPSEGSAPGTSTEPSEGSAPGTSTEPSEGSAPGTSTEPSEGSAPGTSTEPSEGSAPGTSTEPSEGSAPGSPAGSPTSTEEGTSTEPSEGSAPGTSESATPESGPGSEPATSGSETPGTSESATPESGPGSEPATSGSETPGTSESATPESGPGTSTEPSEGSAPGTSESATPESGPGSPAGSPTSTEEGSPAGSPTSTEEGSPAGSPTSTEEGTSESATPESGPGTSTEPSEGSAPGTSESATPESGPGSEPATSGSETPGTSESATPESGPGSEPATSGSETPGTSESATPESGPGTSTEPSEGSAPGSPAGSPTSTEEGTSESATPESGPGSEPATSGSETPGTSESATPESGPGSPAGSPTSTEEGSPAGSPTSTEEGTSTEPSEGSAPGTSESATPESGPGTSESATPESGPGTSESATPESGPGSEPATSGSETPGSEPATSGSETPGSPAGSPTSTEEGTSTEPSEGSAPGTSTEPSEGSAPGSEPATSGSETPGTSESATPESGPGTSTEPSEGAAEPEA

SEQ ID NO: 977 - protein, 1718 aa, Artificial Sequence
  Description of Artificial Sequence: Synthetic polypeptide
HHHHHHSPAGSPTSTEEGTSESATPESGPGTSTEPSEGSAPGTSESATPESGPGSEPATSGSETPGTSESATPESGPGSEPATSGSETPGTSESATPESGPGTSTEPSEGSAPGSPAGSPTSTEEGTSESATPESGPGSEPATSGSETPGTSESATPESGPGSPAGSPTSTEEGSPAGSPTSTEEGTSTEPSEGSAPGTSESATPESGPGTSESATPESGPGTSESATPESGPGSEPATSGSETPGSEPATSGSETPGSPAGSPTSTEEGTSTEPSEGSAPGTSTEPSEGSAPGGSAPEAGRSANHTPAGLTGPATSGSETPGTELVVTQEPSLTVSPGGTVTLTCRSSTGAVTTSNYANWVQQKPGQAPRGLIGGTNKRAPGTPARFSGSLLGGKAALTLSGVQPEDEAEYYCALWYSNLWVFGGGTKLTVLGGGGSDIQMTQSPSSLSASVGDRVTITCQASQDISNYLNWYQQKPGKAPKLLIYDASNLETGVPSRFSGSGSGTDFTFTISSLQPEDIATYFCQHFDHLPLAFGGGTKVEIKGATPPETGAETESPGETTGGSAESEPPGEGQVQLQESGPGLVKPSETLSLTCTVSGGSVSSGDYYWTWIRQSPGKGLEWIGHIYYSGNTNYNPSLKSRLTISIDTSKTQFSLKLSSVTAADTAIYYCVRDRVTGAFDIWGQGTMVTVSSGGGGSEVQLLESGGGLVQPGGSLKLSCAASGFTFNTYAMNWVRQAPGKGLEWVARIRSKYNNYATYYADSVKDRFTISRDDSKNTAYLQMNNLKTEDTAVYYCVRHGNFGNSYVSWFAYWGQGTLVTVSSGTAEAASASGEAGRSANHTPAGLTGPPGSPAGSPTSTEEGTSESATPESGPGTSTEPSEGSAPGSPAGSPTSTEEGTSTEPSEGSAPGTSTEPSEGSAPGTSESATPESGPGSEPATSGSETPGSEPATSGSETPGSPAGSPTSTEEGTSESATPESGPGTSTEPSEGSAPGTSTEPSEGSAPGSPAGSPTSTEEGTSTEPSEGSAPGTSTEPSEGSAPGTSESATPESGPGTSTEPSEGSAPGTSESATPESGPGSEPATSGSETPGTSTEPSEGSAPGTSTEPSEGSAPGTSESATPESGPGTSESATPESGPGSPAGSPTSTEEGTSESATPESGPGSEPATSGSETPGTSESATPESGPGTSTEPSEGSAPGTSTEPSEGSAPGTSTEPSEGSAPGTSTEPSEGSAPGTSTEPSEGSAPGTSTEPSEGSAPGSPAGSPTSTEEGTSTEPSEGSAPGTSESATPESGPGSEPATSGSETPGTSESATPESGPGSEPATSGSETPGTSESATPESGPGTSTEPSEGSAPGTSESATPESGPGSPAGSPTSTEEGSPAGSPTSTEEGSPAGSPTSTEEGTSESATPESGPGTSTEPSEGSAPGTSESATPESGPGSEPATSGSETPGTSESATPESGPGSEPATSGSETPGTSESATPESGPGTSTEPSEGSAPGSPAGSPTSTEEGTSESATPESGPGSEPATSGSETPGTSESATPESGPGSPAGSPTSTEEGSPAGSPTSTEEGTSTEPSEGSAPGTSESATPESGPGTSESATPESGPGTSESATPESGPGSEPATSGSETPGSEPATSGSETPGSPAGSPTSTEEGTSTEPSEGSAPGTSTEPSEGSAPGSEPATSGSETPGTSESATPESGPGTSTEPSEGAAEPEA

SEQ ID NO: 978 - protein, 1422 aa, Artificial Sequence
  Description of Artificial Sequence: Synthetic polypeptide
DIQMTQSPSSLSASVGDRVTITCRSTKSLLHSNGITYLYWYQQKPGKAPKLLIYQMSNLASGVPSRFSSSGSGTDFTLTISSLQPEDFATYYCAQNLEIPRTFGQGTKVEIKGATPPETGAETESPGETTGGSAESEPPGEGQVQLVQSGPGLVQPGGSVRISCAASGYTFTNYGMNWVKQAPGKGLEWMGWINTYTGESTYADSFKGRFTFSLDTSASAAYLQINSLRAEDTAVYYCARFAIKGDYWGQGTLLTVSSGGGGSDIQMTQSPSSLSASVGDRVTITCRASQDIRNYLNWYQQKPGKAPKLLIYYTSRLESGVPSRFSGSGSGTDYTLTISSLQPEDFATYYCQQGNTLPWTFGQGTKVEIKGATPPETGAETESPGETTGGSAESEPPGEGEVQLVESGGGLVQPGGSLRLSCAASGYSFTGYTMNWVRQAPGKGLEWVALINPYKGVSTYNQKFKDRFTISVDKSKNTAYLQMNSLRAEDTAVYYCARSGYYGDSDWYFDVWGQGTLVTVSSGTAEAASASGENLYFQGASCGPLGLAGSPGSPAGSPTSTEEGTSESATPESGPGTSTEPSEGSAPGSPAGSPTSTEEGTSTEPSEGSAPGTSTEPSEGSAPGTSESATPESGPGSEPATSGSETPGSEPATSGSETPGSPAGSPTSTEEGTSESATPESGPGTSTEPSEGSAPGTSTEPSEGSAPGSPAGSPTSTEEGTSTEPSEGSAPGTSTEPSEGSAPGTSESATPESGPGTSTEPSEGSAPGTSESATPESGPGSEPATSGSETPGTSTEPSEGSAPGTSTEPSEGSAPGTSESATPESGPGTSESATPESGPGSPAGSPTSTEEGTSESATPESGPGSEPATSGSETPGTSESATPESGPGTSTEPSEGSAPGTSTEPSEGSAPGTSTEPSEGSAPGTSTEPSEGSAPGTSTEPSEGSAPGTSTEPSEGSAPGSPAGSPTSTEEGTSTEPSEGSAPGTSESATPESGPGSEPATSGSETPGTSESATPESGPGSEPATSGSETPGTSESATPESGPGTSTEPSEGSAPGTSESATPESGPGSPAGSPTSTEEGSPAGSPTSTEEGSPAGSPTSTEEGTSESATPESGPGTSTEPSEGSAPGTSESATPESGPGSEPATSGSETPGTSESATPESGPGSEPATSGSETPGTSESATPESGPGTSTEPSEGSAPGSPAGSPTSTEEGTSESATPESGPGSEPATSGSETPGTSESATPESGPGSPAGSPTSTEEGSPAGSPTSTEEGTSTEPSEGSAPGTSESATPESGPGTSESATPESGPGTSESATPESGPGSEPATSGSETPGSEPATSGSETPGSPAGSPTSTEEGTSTEPSEGSAPGTSTEPSEGSAPGSEPATSGSETPGTSESATPESGPGTSTEPSEGSAPGHHHHHH

SEQ ID NO: 979 - protein, 1023 aa, Artificial Sequence
  Description of Artificial Sequence: Synthetic polypeptide
HHHHHHGSPAGSPTSTEEGTSESATPESGPGTSTEPSEGSAPGSPAGSPTSTEEGTSTEPSEGSAPGTSTEPSEGSAPGTSESATPESGPGSEPATSGSETPGSEPATSGSETPGSPAGSPTSTEEGTSESATPESGPGTSTEPSEGSAPEAGEAAGATSAGATGPATSGSETPGTDIQMTQSPSSLSASVGDRVTITCKASQDVSIGVAWYQQKPGKAPKLLIYSASYRYTGVPSRFSGSGSGTDFTLTISSLQPEDFATYYCQQYYIYPYTFGQGTKVEIKGATPPETGAETESPGETTGGSAESEPPGEGEVQLVESGGGLVQPGGSLRLSCAASGFTFTDYTMDWVRQAPGKGLEWVADVNPNSGGSIYNQRFKGRFTLSVDRSKNTLYLQMNSLRAEDTAVYYCARNLGPSFYFDYWGQGTLVTVSSGGGGSELVVTQEPSLTVSPGGTVTLTCRSSNGAVTSSNYANWVQQKPGQAPRGLIGGTNKRAPGTPARFSGSLLGGKAALTLSGVQPEDEAVYYCALWYPNLWVFGGGTKLTVLGATPPETGAETESPGETTGGSAESEPPGEGEVQLLESGGGIVQPGGSLKLSCAASGFTFNTYAMNWVRQAPGKGLEWVARIRSKYNNYATYYADSVKDRFTISRDDSKNTVYLQMNNLKTEDTAVYYCVRHENFGNSYVSWFAHWGQGTLVTVSSGTAEAASASGTTGEAGEAAGATSAGATGPPGSPAGSPTSTEEGTSESATPESGPGTSTEPSEGSAPGSPAGSPTSTEEGTSTEPSEGSAPGTSTEPSEGSAPGTSESATPESGPGSEPATSGSETPGSEPATSGSETPGSPAGSPTSTEEGTSESATPESGPGTSTEPSEGSAPGTSTEPSEGSAPGSPAGSPTSTEEGTSTEPSEGSAPGTSTEPSEGSAPGTSESATPESGPGTSTEPSEGSAPGTSESATPESGPGSEPATSGSETPGTSTEPSEGSAPGTSTEPSEGSAPGTSESATPESGPGTSESATPEGAAEPEA

SEQ ID NO: 980 - protein, 1425 aa, Artificial Sequence
  Description of Artificial Sequence: Synthetic polypeptide
DIQMTQSPSSLSASVGDRVTITCRSTKSLLHSNGITYLYWYQQKPGKAPKLLIYQMSNLASGVPSRFSSSGSGTDFTLTISSLQPEDFATYYCAQNLEIPRTFGQGTKVEIKGATPPETGAETESPGETTGGSAESEPPGEGQVQLVQSGPGLVQPGGSVRISCAASGYTFTNYGMNWVKQAPGKGLEWMGWINTYTGESTYADSFKGRFTFSLDTSASAAYLQINSLRAEDTAVYYCARFAIKGDYWGQGTLLTVSSGGGGSELVVTQEPSLTVSPGGTVTLTCRSSNGAVTSSNYANWVQQKPGQAPRGLIGGTNKRAPGTPARFSGSLLGGKAALTLSGVQPEDEAVYYCALWYPNLWVFGGGTKLTVLGATPPETGAETESPGETTGGSAESEPPGEGEVQLLESGGGIVQPGGSLKLSCAASGFTFNTYAMNWVRQAPGKGLEWVARIRSKYNNYATYYADSVKDRFTISRDDSKNTVYLQMNNLKTEDTAVYYCVRHENFGNSYVSWFAHWGQGTLVTVSSGTAEAASASGESGRAANTAPEGLTGPPGSPAGSPTSTEEGTSESATPESGPGTSTEPSEGSAPGSPAGSPTSTEEGTSTEPSEGSAPGTSTEPSEGSAPGTSESATPESGPGSEPATSGSETPGSEPATSGSETPGSPAGSPTSTEEGTSESATPESGPGTSTEPSEGSAPGTSTEPSEGSAPGSPAGSPTSTEEGTSTEPSEGSAPGTSTEPSEGSAPGTSESATPESGPGTSTEPSEGSAPGTSESATPESGPGSEPATSGSETPGTSTEPSEGSAPGTSTEPSEGSAPGTSESATPESGPGTSESATPESGPGSPAGSPTSTEEGTSESATPESGPGSEPATSGSETPGTSESATPESGPGTSTEPSEGSAPGTSTEPSEGSAPGTSTEPSEGSAPGTSTEPSEGSAPGTSTEPSEGSAPGTSTEPSEGSAPGSPAGSPTSTEEGTSTEPSEGSAPGTSESATPESGPGSEPATSGSETPGTSESATPESGPGSEPATSGSETPGTSESATPESGPGTSTEPSEGSAPGTSESATPESGPGSPAGSPTSTEEGSPAGSPTSTEEGSPAGSPTSTEEGTSESATPESGPGTSTEPSEGSAPGTSESATPESGPGSEPATSGSETPGTSESATPESGPGSEPATSGSETPGTSESATPESGPGTSTEPSEGSAPGSPAGSPTSTEEGTSESATPESGPGSEPATSGSETPGTSESATPESGPGSPAGSPTSTEEGSPAGSPTSTEEGTSTEPSEGSAPGTSESATPESGPGTSESATPESGPGTSESATPESGPGSEPATSGSETPGSEPATSGSETPGSPAGSPTSTEEGTSTEPSEGSAPGTSTEPSEGSAPGSEPATSGSETPGTSESATPESGPGTSTEPSEGSAPGHHHHHH

SEQ ID NO: 981 - protein, 1425 aa, Artificial Sequence
  Description of Artificial Sequence: Synthetic polypeptide
DIQMTQSPSSLSASVGDRVTITCRSTKSLLHSNGITYLYWYQQKPGKAPKLLIYQMSNLASGVPSRFSSSGSGTDFTLTISSLQPEDFATYYCAQNLEIPRTFGQGTKVEIKGATPPETGAETESPGETTGGSAESEPPGEGQVQLVQSGPGLVQPGGSVRISCAASGYTFTNYGMNWVKQAPGKGLEWMGWINTYTGESTYADSFKGRFTFSLDTSASAAYLQINSLRAEDTAVYYCARFAIKGDYWGQGTLLTVSSGGGGSELVVTQEPSLTVSPGGTVTLTCRSSNGEVTTSNYANWVQQKPGQAPRGLIGGTIKRAPGTPARFSGSLLGGKAALTLSGVQPEDEAVYYCALWYPNLWVFGGGTKLTVLGATPPETGAETESPGETTGGSAESEPPGEGEVQLLESGGGIVQPGGSLKLSCAASGFTFNTYAMNWVRQAPGKGLEWVARIRSKYNNYATYYADSVKDRFTISRDDSKNTVYLQMNNLKTEDTAVYYCVRHENFGNSYVSWFAHWGQGTLVTVSSGTAEAASASGESGRAANTAPEGLTGPPGSPAGSPTSTEEGTSESATPESGPGTSTEPSEGSAPGSPAGSPTSTEEGTSTEPSEGSAPGTSTEPSEGSAPGTSESATPESGPGSEPATSGSETPGSEPATSGSETPGSPAGSPTSTEEGTSESATPESGPGTSTEPSEGSAPGTSTEPSEGSAPGSPAGSPTSTEEGTSTEPSEGSAPGTSTEPSEGSAPGTSESATPESGPGTSTEPSEGSAPGTSESATPESGPGSEPATSGSETPGTSTEPSEGSAPGTSTEPSEGSAPGTSESATPESGPGTSESATPESGPGSPAGSPTSTEEGTSESATPESGPGSEPATSGSETPGTSESATPESGPGTSTEPSEGSAPGTSTEPSEGSAPGTSTEPSEGSAPGTSTEPSEGSAPGTSTEPSEGSAPGTSTEPSEGSAPGSPAGSPTSTEEGTSTEPSEGSAPGTSESATPESGPGSEPATSGSETPGTSESATPESGPGSEPATSGSETPGTSESATPESGPGTSTEPSEGSAPGTSESATPESGPGSPAGSPTSTEEGSPAGSPTSTEEGSPAGSPTSTEEGTSESATPESGPGTSTEPSEGSAPGTSESATPESGPGSEPATSGSETPGTSESATPESGPGSEPATSGSETPGTSESATPESGPGTSTEPSEGSAPGSPAGSPTSTEEGTSESATPESGPGSEPATSGSETPGTSESATPESGPGSPAGSPTSTEEGSPAGSPTSTEEGTSTEPSEGSAPGTSESATPESGPGTSESATPESGPGTSESATPESGPGSEPATSGSETPGSEPATSGSETPGSPAGSPTSTEEGTSTEPSEGSAPGTSTEPSEGSAPGSEPATSGSETPGTSESATPESGPGTSTEPSEGSAPGHHHHHH

SEQ ID NO: 982 - protein, 1425 aa, Artificial Sequence
  Description of Artificial Sequence: Synthetic polypeptide
DIQMTQSPSSLSASVGDRVTITCRSTKSLLHSNGITYLYWYQQKPGKAPKLLIYQMSNLASGVPSRFSSSGSGTDFTLTISSLQPEDFATYYCAQNLEIPRTFGQGTKVEIKGATPPETGAETESPGETTGGSAESEPPGEGQVQLVQSGPGLVQPGGSVRISCAASGYTFTNYGMNWVKQAPGKGLEWMGWINTYTGESTYADSFKGRFTFSLDTSASAAYLQINSLRAEDTAVYYCARFAIKGDYWGQGTLLTVSSGGGGSELVVTQEPSHTVSPGGTVTLTCRSSTGAVTSSNYANWVQQKPGQAPRGLIGGTIKRAPGTPARFSGSLLGGKAALTLSGVQPEDEAEYYCALWYPNLWVFGGGTKLTVLGATPPETGAETESPGETTGGSAESEPPGEGEVQLLESGGGIVQPGGSLKLSCAASGFTFNTYAMNWVRQAPGKGLEWVARIRSKYNNYATYYADSVKDRFTISRDDSKNTVYLQMNNLKTEDTAVYYCVRHENFGNSYVSWFAHWGQGTLVTVSSGTAEAASASGESGRAANTAPEGLTGPPGSPAGSPTSTEEGTSESATPESGPGTSTEPSEGSAPGSPAGSPTSTEEGTSTEPSEGSAPGTSTEPSEGSAPGTSESATPESGPGSEPATSGSETPGSEPATSGSETPGSPAGSPTSTEEGTSESATPESGPGTSTEPSEGSAPGTSTEPSEGSAPGSPAGSPTSTEEGTSTEPSEGSAPGTSTEPSEGSAPGTSESATPESGPGTSTEPSEGSAPGTSESATPESGPGSEPATSGSETPGTSTEPSEGSAPGTSTEPSEGSAPGTSESATPESGPGTSESATPESGPGSPAGSPTSTEEGTSESATPESGPGSEPATSGSETPGTSESATPESGPGTSTEPSEGSAPGTSTEPSEGSAPGTSTEPSEGSAPGTSTEPSEGSAPGTSTEPSEGSAPGTSTEPSEGSAPGSPAGSPTSTEEGTSTEPSEGSAPGTSESATPESGPGSEPATSGSETPGTSESATPESGPGSEPATSGSETPGTSESATPESGPGTSTEPSEGSAPGTSESATPESGPGSPAGSPTSTEEGSPAGSPTSTEEGSPAGSPTSTEEGTSESATPESGPGTSTEPSEGSAPGTSESATPESGPGSEPATSGSETPGTSESATPESGPGSEPATSGSETPGTSESATPESGPGTSTEPSEGSAPGSPAGSPTSTEEGTSESATPESGPGSEPATSGSETPGTSESATPESGPGSPAGSPTSTEEGSPAGSPTSTEEGTSTEPSEGSAPGTSESATPESGPGTSESATPESGPGTSESATPESGPGSEPATSGSETPGSEPATSGSETPGSPAGSPTSTEEGTSTEPSEGSAPGTSTEPSEGSAPGSEPATSGSETPGTSESATPESGPGTSTEPSEGSAPGHHHHHH

SEQ ID NO: 983 - protein, 1425 aa, Artificial Sequence
  Description of Artificial Sequence: Synthetic polypeptide
DIQMTQSPSSLSASVGDRVTITCRSTKSLLHSNGITYLYWYQQKPGKAPKLLIYQMSNLASGVPSRFSSSGSGTDFTLTISSLQPEDFATYYCAQNLEIPRTFGQGTKVEIKGATPPETGAETESPGETTGGSAESEPPGEGQVQLVQSGPGLVQPGGSVRISCAASGYTFTNYGMNWVKQAPGKGLEWMGWINTYTGESTYADSFKGRFTFSLDTSASAAYLQINSLRAEDTAVYYCARFAIKGDYWGQGTLLTVSSGGGGSELVVTQEPSHTVSPGGTVTLTCRSSTGEVTTSNYANWVQQKPGQAPRGLIGGTIKRAPGTPARFSGSLLGGKAALTLSGVQPEDEAEYYCALWYPNLWVFGGGTKLTVLGATPPETGAETESPGETTGGSAESEPPGEGEVQLLESGGGIVQPGGSLKLSCAASGFTFNTYAMNWVRQAPGKGLEWVARIRSKYNNYATYYADSVKDRFTISRDDSKNTVYLQMNNLKTEDTAVYYCVRHENFGNSYVSWFAHWGQGTLVTVSSGTAEAASASGESGRAANTAPEGLTGPPGSPAGSPTSTEEGTSESATPESGPGTSTEPSEGSAPGSPAGSPTSTEEGTSTEPSEGSAPGTSTEPSEGSAPGTSESATPESGPGSEPATSGSETPGSEPATSGSETPGSPAGSPTSTEEGTSESATPESGPGTSTEPSEGSAPGTSTEPSEGSAPGSPAGSPTSTEEGTSTEPSEGSAPGTSTEPSEGSAPGTSESATPESGPGTSTEPSEGSAPGTSESATPESGPGSEPATSGSETPGTSTEPSEGSAPGTSTEPSEGSAPGTSESATPESGPGTSESATPESGPGSPAGSPTSTEEGTSESATPESGPGSEPATSGSETPGTSESATPESGPGTSTEPSEGSAPGTSTEPSEGSAPGTSTEPSEGSAPGTSTEPSEGSAPGTSTEPSEGSAPGTSTEPSEGSAPGSPAGSPTSTEEGTSTEPSEGSAPGTSESATPESGPGSEPATSGSETPGTSESATPESGPGSEPATSGSETPGTSESATPESGPGTSTEPSEGSAPGTSESATPESGPGSPAGSPTSTEEGSPAGSPTSTEEGSPAGSPTSTEEGTSESATPESGPGTSTEPSEGSAPGTSESATPESGPGSEPATSGSETPGTSESATPESGPGSEPATSGSETPGTSESATPESGPGTSTEPSEGSAPGSPAGSPTSTEEGTSESATPESGPGSEPATSGSETPGTSESATPESGPGSPAGSPTSTEEGSPAGSPTSTEEGTSTEPSEGSAPGTSESATPESGPGTSESATPESGPGTSESATPESGPGSEPATSGSETPGSEPATSGSETPGSPAGSPTSTEEGTSTEPSEGSAPGTSTEPSEGSAPGSEPATSGSETPGTSESATPESGPGTSTEPSEGSAPGHHHHHH

SEQ ID NO: 984 - protein, 1743 aa, Artificial Sequence
  Description of Artificial Sequence: Synthetic polypeptide
HHHHHHSPAGSPTSTEEGTSESATPESGPGTSTEPSEGSAPGTSESATPESGPGSEPATSGSETPGTSESATPESGPGSEPATSGSETPGTSESATPESGPGTSTEPSEGSAPGSPAGSPTSTEEGTSESATPESGPGSEPATSGSETPGTSESATPESGPGSPAGSPTSTEEGSPAGSPTSTEEGTSTEPSEGSAPGTSESATPESGPGTSESATPESGPGTSESATPESGPGSEPATSGSETPGSEPATSGSETPGSPAGSPTSTEEGTSTEPSEGSAPGTSTEPSEGSAPGGSAPEAGRSANHTPAGLTGPATSGSETPGTDIQMTQSPSSLSASVGDRVTITCKASQDVSIGVAWYQQKPGKAPKLLIYSASYRYTGVPSRFSGSGSGTDFTLTISSLQPEDFATYYCQQYYIYPYTFGQGTKVEIKGATPPETGAETESPGETTGGSAESEPPGEGEVQLVESGGGLVQPGGSLRLSCAASGFTFTDYTMDWVRQAPGKGLEWVADVNPNSGGSIYNQRFKGRFTLSVDRSKNTLYLQMNSLRAEDTAVYYCARNLGPSFYFDYWGQGTLVTVSSGGGGSELVVTQEPSLTVSPGGTVTLTCRSSNGAVTSSNYANWVQQKPGQAPRGLIGGTNKRAPGTPARFSGSLLGGKAALTLSGVQPEDEAVYYCALWYPNLWVFGGGTKLTVLGATPPETGAETESPGETTGGSAESEPPGEGEVQLLESGGGIVQPGGSLKLSCAASGFTFNTYAMNWVRQAPGKGLEWVARIRSKYNNYATYYADSVKDRFTISRDDSKNTVYLQMNNLKTEDTAVYYCVRHENFGNSYVSWFAHWGQGTLVTVSSGTAEAASASGEAGRSANHTPAGLTGPPGSPAGSPTSTEEGTSESATPESGPGTSTEPSEGSAPGSPAGSPTSTEEGTSTEPSEGSAPGTSTEPSEGSAPGTSESATPESGPGSEPATSGSETPGSEPATSGSETPGSPAGSPTSTEEGTSESATPESGPGTSTEPSEGSAPGTSTEPSEGSAPGSPAGSPTSTEEGTSTEPSEGSAPGTSTEPSEGSAPGTSESATPESGPGTSTEPSEGSAPGTSESATPESGPGSEPATSGSETPGTSTEPSEGSAPGTSTEPSEGSAPGTSESATPESGPGTSESATPESGPGSPAGSPTSTEEGTSESATPESGPGSEPATSGSETPGTSESATPESGPGTSTEPSEGSAPGTSTEPSEGSAPGTSTEPSEGSAPGTSTEPSEGSAPGTSTEPSEGSAPGTSTEPSEGSAPGSPAGSPTSTEEGTSTEPSEGSAPGTSESATPESGPGSEPATSGSETPGTSESATPESGPGSEPATSGSETPGTSESATPESGPGTSTEPSEGSAPGTSESATPESGPGSPAGSPTSTEEGSPAGSPTSTEEGSPAGSPTSTEEGTSESATPESGPGTSTEPSEGSAPGTSESATPESGPGSEPATSGSETPGTSESATPESGPGSEPATSGSETPGTSESATPESGPGTSTEPSEGSAPGSPAGSPTSTEEGTSESATPESGPGSEPATSGSETPGTSESATPESGPGSPAGSPTSTEEGSPAGSPTSTEEGTSTEPSEGSAPGTSESATPESGPGTSESATPESGPGTSESATPESGPGSEPATSGSETPGSEPATSGSETPGSPAGSPTSTEEGTSTEPSEGSAPGTSTEPSEGSAPGSEPATSGSETPGTSESATPESGPGTSTEPSEGAAEPEA

SEQ ID NO: 985 - protein, 1743 aa, Artificial Sequence
  Description of Artificial Sequence: Synthetic polypeptide
HHHHHHSPAGSPTSTEEGTSESATPESGPGTSTEPSEGSAPGTSESATPESGPGSEPATSGSETPGTSESATPESGPGSEPATSGSETPGTSESATPESGPGTSTEPSEGSAPGSPAGSPTSTEEGTSESATPESGPGSEPATSGSETPGTSESATPESGPGSPAGSPTSTEEGSPAGSPTSTEEGTSTEPSEGSAPGTSESATPESGPGTSESATPESGPGTSESATPESGPGSEPATSGSETPGSEPATSGSETPGSPAGSPTSTEEGTSTEPSEGSAPGTSTEPSEGSAPGGSAPEAGRSANHTPAGLTGPATSGSETPGTDIQMTQSPSSLSASVGDRVTITCQASQDISNYLNWYQQKPGKAPKLLIYDASNLETGVPSRFSGSGSGTDFTFTISSLQPEDIATYFCQHFDHLPLAFGGGTKVEIKGATPPETGAETESPGETTGGSAESEPPGEGQVQLQESGPGLVKPSETLSLTCTVSGGSVSSGDYYWTWIRQSPGKGLEWIGHIYYSGNTNYNPSLKSRLTISIDTSKTQFSLKLSSVTAADTAIYYCVRDRVTGAFDIWGQGTMVTVSSGGGGSELVVTQEPSLTVSPGGTVTLTCRSSNGAVTSSNYANWVQQKPGQAPRGLIGGTNKRAPGTPARFSGSSLGGSAALTLSGVQPEDEAVYYCALWYPNLWVFGGGTKLTVLGATPPETGAETESPGETTGGSAESEPPGEGEVQLQESGGGIVQPGGSLKLSCAASGFTFNTYAMNWVRQAPGKGLEWVARIRSKYNNYATYYADSVKDRFTISRDDSKNTVYLQMNNLKTEDTAVYYCVRHENFGNSYVSWFAHWGQGTLVTVSSGTAEAASASGEAGRSANHTPAGLTGPPGSPAGSPTSTEEGTSESATPESGPGTSTEPSEGSAPGSPAGSPTSTEEGTSTEPSEGSAPGTSTEPSEGSAPGTSESATPESGPGSEPATSGSETPGSEPATSGSETPGSPAGSPTSTEEGTSESATPESGPGTSTEPSEGSAPGTSTEPSEGSAPGSPAGSPTSTEEGTSTEPSEGSAPGTSTEPSEGSAPGTSESATPESGPGTSTEPSEGSAPGTSESATPESGPGSEPATSGSETPGTSTEPSEGSAPGTSTEPSEGSAPGTSESATPESGPGTSESATPESGPGSPAGSPTSTEEGTSESATPESGPGSEPATSGSETPGTSESATPESGPGTSTEPSEGSAPGTSTEPSEGSAPGTSTEPSEGSAPGTSTEPSEGSAPGTSTEPSEGSAPGTSTEPSEGSAPGSPAGSPTSTEEGTSTEPSEGSAPGTSESATPESGPGSEPATSGSETPGTSESATPESGPGSEPATSGSETPGTSESATPESGPGTSTEPSEGSAPGTSESATPESGPGSPAGSPTSTEEGSPAGSPTSTEEGSPAGSPTSTEEGTSESATPESGPGTSTEPSEGSAPGTSESATPESGPGSEPATSGSETPGTSESATPESGPGSEPATSGSETPGTSESATPESGPGTSTEPSEGSAPGSPAGSPTSTEEGTSESATPESGPGSEPATSGSETPGTSESATPESGPGSPAGSPTSTEEGSPAGSPTSTEEGTSTEPSEGSAPGTSESATPESGPGTSESATPESGPGTSESATPESGPGSEPATSGSETPGSEPATSGSETPGSPAGSPTSTEEGTSTEPSEGSAPGTSTEPSEGSAPGSEPATSGSETPGTSESATPESGPGTSTEPSEGAAEPEA

SEQ ID NO: 986 - protein, 1743 aa, Artificial Sequence
  Description of Artificial Sequence: Synthetic polypeptide
HHHHHHSPAGSPTSTEEGTSESATPESGPGTSTEPSEGSAPGTSESATPESGPGSEPATSGSETPGTSESATPESGPGSEPATSGSETPGTSESATPESGPGTSTEPSEGSAPGSPAGSPTSTEEGTSESATPESGPGSEPATSGSETPGTSESATPESGPGSPAGSPTSTEEGSPAGSPTSTEEGTSTEPSEGSAPGTSESATPESGPGTSESATPESGPGTSESATPESGPGSEPATSGSETPGSEPATSGSETPGSPAGSPTSTEEGTSTEPSEGSAPGTSTEPSEGSAPGGSAPEAGRSANHTPAGLTGPATSGSETPGTDIQMTQSPSSLSASVGDRVTITCQASQDISNYLNWYQQKPGKAPKLLIYDASNLETGVPSRFSGSGSGTDFTFTISRLQPEDTATYFCQHFDHLPLAFGGGTKVEIKGATPPETGAETESPGETTGGSAESEPPGEGQVQLQESGPGAVKPSETLSLTCTVSGGSVSSGDYYWTWIRQSPGKGLEWIGHIYYSGNTNYNPSLKSRLTISIDTSKTQFSLKLSSVTAADTATYYCVRDRVTGAFDIWGQGTAVTVSSGGGGSELVVTQEPSLTVSPGGTVTLTCRSSNGAVTSSNYANWVQQKPGQAPRGLIGGTNKRAPGTPARFSGSSLGGSAALTLSGVQPEDEAVYYCALWYPNLWVFGGGTKLTVLGATPPETGAETESPGETTGGSAESEPPGEGEVQLQESGGGIVQPGGSLKLSCAASGFTFNTYAMNWVRQAPGKGLEWVARIRSKYNNYATYYADSVKDRFTISRDDSKNTVYLQMNNLKTEDTAVYYCVRHENFGNSYVSWFAHWGQGTLVTVSSGTAEAASASGEAGRSANHTPAGLTGPPGSPAGSPTSTEEGTSESATPESGPGTSTEPSEGSAPGSPAGSPTSTEEGTSTEPSEGSAPGTSTEPSEGSAPGTSESATPESGPGSEPATSGSETPGSEPATSGSETPGSPAGSPTSTEEGTSESATPESGPGTSTEPSEGSAPGTSTEPSEGSAPGSPAGSPTSTEEGTSTEPSEGSAPGTSTEPSEGSAPGTSESATPESGPGTSTEPSEGSAPGTSESATPESGPGSEPATSGSETPGTSTEPSEGSAPGTSTEPSEGSAPGTSESATPESGPGTSESATPESGPGSPAGSPTSTEEGTSESATPESGPGSEPATSGSETPGTSESATPESGPGTSTEPSEGSAPGTSTEPSEGSAPGTSTEPSEGSAPGTSTEPSEGSAPGTSTEPSEGSAPGTSTEPSEGSAPGSPAGSPTSTEEGTSTEPSEGSAPGTSESATPESGPGSEPATSGSETPGTSESATPESGPGSEPATSGSETPGTSESATPESGPGTSTEPSEGSAPGTSESATPESGPGSPAGSPTSTEEGSPAGSPTSTEEGSPAGSPTSTEEGTSESATPESGPGTSTEPSEGSAPGTSESATPESGPGSEPATSGSETPGTSESATPESGPGSEPATSGSETPGTSESATPESGPGTSTEPSEGSAPGSPAGSPTSTEEGTSESATPESGPGSEPATSGSETPGTSESATPESGPGSPAGSPTSTEEGSPAGSPTSTEEGTSTEPSEGSAPGTSESATPESGPGTSESATPESGPGTSESATPESGPGSEPATSGSETPGSEPATSGSETPGSPAGSPTSTEEGTSTEPSEGSAPGTSTEPSEGSAPGSEPATSGSETPGTSESATPESGPGTSTEPSEGAAEPEA

SEQ ID NO: 987 - protein, 1459 aa, Artificial Sequence
  Description of Artificial Sequence: Synthetic polypeptide
HHHHHHSPAGSPTSTEEGTSESATPESGPGTSTEPSEGSAPGTSESATPESGPGSEPATSGSETPGTSESATPESGPGSEPATSGSETPGTSESATPESGPGTSTEPSEGSAPGSPAGSPTSTEEGTSESATPESGPGSEPATSGSETPGTSESATPESGPGSPAGSPTSTEEGSPAGSPTSTEEGTSTEPSEGSAPGTSESATPESGPGTSESATPESGPGTSESATPESGPGSEPATSGSETPGSEPATSGSETPGSPAGSPTSTEEGTSTEPSEGSAPGTSTEPSEGSAPGGSAPEAGRSANHTPAGLTGPATSGSETPGTDIQMTQSPSSLSASVGDRVTITCKASQDVSIGVAWYQQKPGKAPKLLIYSASYRYTGVPSRFSGSGSGTDFTLTISSLQPEDFATYYCQQYYIYPYTFGQGTKVEIKGATPPETGAETESPGETTGGSAESEPPGEGEVQLVESGGGLVQPGGSLRLSCAASGFTFTDYTMDWVRQAPGKGLEWVADVNPNSGGSIYNQRFKGRFTLSVDRSKNTLYLQMNSLRAEDTAVYYCARNLGPSFYFDYWGQGTLVTVSSGGGGSELVVTQEPSLTVSPGGTVTLTCRSSNGAVTSSNYANWVQQKPGQAPRGLIGGTNKRAPGTPARFSGSLLGGKAALTLSGVQPEDEAVYYCALWYPNLWVFGGGTKLTVLGATPPETGAETESPGETTGGSAESEPPGEGEVQLLESGGGIVQPGGSLKLSCAASGFTFNTYAMNWVRQAPGKGLEWVARIRSKYNNYATYYADSVKDRFTISRDDSKNTVYLQMNNLKTEDTAVYYCVRHENFGNSYVSWFAHWGQGTLVTVSSGTAEAASASGEAGRSANHTPAGLTGPPGSPAGSPTSTEEGTSESATPESGPGTSTEPSEGSAPGSPAGSPTSTEEGTSTEPSEGSAPGTSTEPSEGSAPGTSESATPESGPGSEPATSGSETPGSEPATSGSETPGSPAGSPTSTEEGTSESATPESGPGTSTEPSEGSAPGTSTEPSEGSAPGSPAGSPTSTEEGTSTEPSEGSAPGTSTEPSEGSAPGTSESATPESGPGTSTEPSEGSAPGTSESATPESGPGSEPATSGSETPGTSTEPSEGSAPGTSTEPSEGSAPGTSESATPESGPGTSESATPESGPGSPAGSPTSTEEGTSESATPESGPGSEPATSGSETPGTSESATPESGPGTSTEPSEGSAPGTSTEPSEGSAPGTSTEPSEGSAPGTSTEPSEGSAPGTSTEPSEGSAPGTSTEPSEGSAPGSPAGSPTSTEEGTSTEPSEGSAPGTSESATPESGPGSEPATSGSETPGTSESATPESGPGSEPATSGSETPGTSESATPESGPGTSTEPSEGSAPGTSESATPESGPGSPAGSPTSTEEGSPAGSPTSTEEGSPAGSPTSTEEGTSESATPESGPGTSTEPSEGSAPGAAEPEA

SEQ ID NO: 988 - protein, 1175 aa, Artificial Sequence
  Description of Artificial Sequence: Synthetic polypeptide
HHHHHHSPAGSPTSTEEGTSESATPESGPGTSTEPSEGSAPGTSESATPESGPGSEPATSGSETPGTSESATPESGPGSEPATSGSETPGTSESATPESGPGTSTEPSEGSAPGSPAGSPTSTEEGTSESATPESGPGSEPATSGSETPGTSESATPESGPGSPAGSPTSTEEGSPAGSPTSTEEGTSTEPSEGSAPGTSESATPESGPGTSESATPESGPGTSESATPESGPGSEPATSGSETPGSEPATSGSETPGSPAGSPTSTEEGTSTEPSEGSAPGTSTEPSEGSAPGGSAPEAGRSANHTPAGLTGPATSGSETPGTDIQMTQSPSSLSASVGDRVTITCKASQDVSIGVAWYQQKPGKAPKLLIYSASYRYTGVPSRFSGSGSGTDFTLTISSLQPEDFATYYCQQYYIYPYTFGQGTKVEIKGATPPETGAETESPGETTGGSAESEPPGEGEVQLVESGGGLVQPGGSLRLSCAASGFTFTDYTMDWVRQAPGKGLEWVADVNPNSGGSIYNQRFKGRFTLSVDRSKNTLYLQMNSLRAEDTAVYYCARNLGPSFYFDYWGQGTLVTVSSGGGGSELVVTQEPSLTVSPGGTVTLTCRSSNGAVTSSNYANWVQQKPGQAPRGLIGGTNKRAPGTPARFSGSLLGGKAALTLSGVQPEDEAVYYCALWYPNLWVFGGGTKLTVLGATPPETGAETESPGETTGGSAESEPPGEGEVQLLESGGGIVQPGGSLKLSCAASGFTFNTYAMNWVRQAPGKGLEWVARIRSKYNNYATYYADSVKDRFTISRDDSKNTVYLQMNNLKTEDTAVYYCVRHENFGNSYVSWFAHWGQGTLVTVSSGTAEAASASGEAGRSANHTPAGLTGPPGSPAGSPTSTEEGTSESATPESGPGTSTEPSEGSAPGSPAGSPTSTEEGTSTEPSEGSAPGTSTEPSEGSAPGTSESATPESGPGSEPATSGSETPGSEPATSGSETPGSPAGSPTSTEEGTSESATPESGPGTSTEPSEGSAPGTSTEPSEGSAPGSPAGSPTSTEEGTSTEPSEGSAPGTSTEPSEGSAPGTSESATPESGPGTSTEPSEGSAPGTSESATPESGPGSEPATSGSETPGTSTEPSEGSAPGTSTEPSEGSAPGTSESATPESGPGTSESATPESGPGSPAGAAEPEA

SEQ ID NO: 989 - protein, 1020 aa, Artificial Sequence
  Description of Artificial Sequence: Synthetic polypeptide
HHHHHHGSPAGSPTSTEEGTSESATPESGPGTSTEPSEGSAPGSPAGSPTSTEEGTSTEPSEGSAPGTSTEPSEGSAPGTSESATPESGPGSEPATSGSETPGSEPATSGSETPGSPAGSPTSTEEGTSESATPESGPGTSTEPSEGSAPEAGRSANHTPAGLTGPATSGSETPGTDIQMTQSPSSLSASVGDRVTITCKASQDVSIGVAWYQQKPGKAPKLLIYSASYRYTGVPSRFSGSGSGTDFTLTISSLQPEDFATYYCQQYYIYPYTFGQGTKVEIKGATPPETGAETESPGETTGGSAESEPPGEGEVQLVESGGGLVQPGGSLRLSCAASGFTFTDYTMDWVRQAPGKGLEWVADVNPNSGGSIYNQRFKGRFTLSVDRSKNTLYLQMNSLRAEDTAVYYCARNLGPSFYFDYWGQGTLVTVSSGGGGSELVVTQEPSLTVSPGGTVTLTCRSSNGAVTSSNYANWVQQKPGQAPRGLIGGTNKRAPGTPARFSGSLLGGKAALTLSGVQPEDEAVYYCALWYPNLWVFGGGTKLTVLGATPPETGAETESPGETTGGSAESEPPGEGEVQLLESGGGIVQPGGSLKLSCAASGFTFNTYAMNWVRQAPGKGLEWVARIRSKYNNYATYYADSVKDRFTISRDDSKNTVYLQMNNLKTEDTAVYYCVRHENFGNSYVSWFAHWGQGTLVTVSSGTAEAASASGEAGRSANHTPAGLTGPPGSPAGSPTSTEEGTSESATPESGPGTSTEPSEGSAPGSPAGSPTSTEEGTSTEPSEGSAPGTSTEPSEGSAPGTSESATPESGPGSEPATSGSETPGSEPATSGSETPGSPAGSPTSTEEGTSESATPESGPGTSTEPSEGSAPGTSTEPSEGSAPGSPAGSPTSTEEGTSTEPSEGSAPGTSTEPSEGSAPGTSESATPESGPGTSTEPSEGSAPGTSESATPESGPGSEPATSGSETPGTSTEPSEGSAPGTSTEPSEGSAPGTSESATPESGPGTSESATPEGAAEPEA

SEQ ID NO: 990 - protein, 1743 aa, Artificial Sequence
  Description of Artificial Sequence: Synthetic polypeptide
HHHHHHSPAGSPTSTEEGTSESATPESGPGTSTEPSEGSAPGTSESATPESGPGSEPATSGSETPGTSESATPESGPGSEPATSGSETPGTSESATPESGPGTSTEPSEGSAPGSPAGSPTSTEEGTSESATPESGPGSEPATSGSETPGTSESATPESGPGSPAGSPTSTEEGSPAGSPTSTEEGTSTEPSEGSAPGTSESATPESGPGTSESATPESGPGTSESATPESGPGSEPATSGSETPGSEPATSGSETPGSPAGSPTSTEEGTSTEPSEGSAPGTSTEPSEGSAPGGSAPEAGRSANHTPAGLTGPATSGSETPGTDIQMTQSPSSLSASVGDRVTITCQASQDISNYLNWYQQKPGKAPKLLIYDASNLETGVPSRFSGSGSGTDFTFTISSLQPEDIATYFCQHFDHLPLAFGGGTKVEIKGATPPETGAETESPGETTGGSAESEPPGEGQVQLQESGPGLVKPSETLSLTCTVSGGSVSSGDYYWTWIRQSPGKGLEWIGHIYYSGNTNYNPSLKSRLTISIDTSKTQFSLKLSSVTAADTAIYYCVRDRVTGAFDIWGQGTMVTVSSGGGGSELVVTQEPSLTVSPGGTVTLTCRSSTGAVTTSNYANWVQQKPGQAPRGLIGGTNKRAPGTPARFSGSLLGGKAALTLSGVQPEDEAEYYCALWYSNLWVFGGGTKLTVLGATPPETGAETESPGETTGGSAESEPPGEGEVQLLESGGGLVQPGGSLKLSCAASGFTFNTYAMNWVRQAPGKGLEWVARIRSKYNNYATYYADSVKDRFTISRDDSKNTAYLQMNNLKTEDTAVYYCVRHGNFGNSYVSWFAYWGQGTLVTVSSGTAEAASASGEAGRSANHTPAGLTGPPGSPAGSPTSTEEGTSESATPESGPGTSTEPSEGSAPGSPAGSPTSTEEGTSTEPSEGSAPGTSTEPSEGSAPGTSESATPESGPGSEPATSGSETPGSEPATSGSETPGSPAGSPTSTEEGTSESATPESGPGTSTEPSEGSAPGTSTEPSEGSAPGSPAGSPTSTEEGTSTEPSEGSAPGTSTEPSEGSAPGTSESATPESGPGTSTEPSEGSAPGTSESATPESGPGSEPATSGSETPGTSTEPSEGSAPGTSTEPSEGSAPGTSESATPESGPGTSESATPESGPGSPAGSPTSTEEGTSESATPESGPGSEPATSGSETPGTSESATPESGPGTSTEPSEGSAPGTSTEPSEGSAPGTSTEPSEGSAPGTSTEPSEGSAPGTSTEPSEGSAPGTSTEPSEGSAPGSPAGSPTSTEEGTSTEPSEGSAPGTSESATPESGPGSEPATSGSETPGTSESATPESGPGSEPATSGSETPGTSESATPESGPGTSTEPSEGSAPGTSESATPESGPGSPAGSPTSTEEGSPAGSPTSTEEGSPAGSPTSTEEGTSESATPESGPGTSTEPSEGSAPGTSESATPESGPGSEPATSGSETPGTSESATPESGPGSEPATSGSETPGTSESATPESGPGTSTEPSEGSAPGSPAGSPTSTEEGTSESATPESGPGSEPATSGSETPGTSESATPESGPGSPAGSPTSTEEGSPAGSPTSTEEGTSTEPSEGSAPGTSESATPESGPGTSESATPESGPGTSESATPESGPGSEPATSGSETPGSEPATSGSETPGSPAGSPTSTEEGTSTEPSEGSAPGTSTEPSEGSAPGSEPATSGSETPGTSESATPESGPGTSTEPSEGAAEPEA

SEQ ID NO: 991 - protein, 1743 aa, Artificial Sequence
  Description of Artificial Sequence: Synthetic polypeptide
HHHHHHSPAGSPTSTEEGTSESATPESGPGTSTEPSEGSAPGTSESATPESGPGSEPATSGSETPGTSESATPESGPGSEPATSGSETPGTSESATPESGPGTSTEPSEGSAPGSPAGSPTSTEEGTSESATPESGPGSEPATSGSETPGTSESATPESGPGSPAGSPTSTEEGSPAGSPTSTEEGTSTEPSEGSAPGTSESATPESGPGTSESATPESGPGTSESATPESGPGSEPATSGSETPGSEPATSGSETPGSPAGSPTSTEEGTSTEPSEGSAPGTSTEPSEGSAPGGSAPEAGRSANHTPAGLTGPATSGSETPGTDIQMTQSPSSLSASVGDRVTITCQASQDISNYLNWYQQKPGKAPKLLIYDASNLETGVPSRFSGSGSGTDFTFTISSLQPEDTATYFCQHFDHLPLAFGGGTKVEIKGATPPETGAETESPGETTGGSAESEPPGEGQVQLQESGPGAVKPSETLSLTCTVSGGSVSSGDYYWTWIRQSPGKGLEWIGHIYYSGNTNYNPSLKSRLTISIDTSKTQFSLKLSSVTAADTATYYCVRDRVTGAFDIWGQGTAVTVSSGGGGSELVVTQEPSLTVSPGGTVTLTCRSSTGAVTTSNYANWVQQKPGQAPRGLIGGTNKRAPGTPARFSGSSLGGSAALTLSGVQPEDEAEYYCALWYSNLWVFGGGTKLTVLGATPPETGAETESPGETTGGSAESEPPGEGEVQLQESGGGLVQPGGSLKLSCAASGFTFNTYAMNWVRQAPGKGLEWVARIRSKYNNYATYYADSVKDRFTISRDDSKNTAYLQMNNLKTEDTAVYYCVRHGNFGNSYVSWFAYWGQGTLVTVSSGTAEAASASGEAGRSANHTPAGLTGPPGSPAGSPTSTEEGTSESATPESGPGTSTEPSEGSAPGSPAGSPTSTEEGTSTEPSEGSAPGTSTEPSEGSAPGTSESATPESGPGSEPATSGSETPGSEPATSGSETPGSPAGSPTSTEEGTSESATPESGPGTSTEPSEGSAPGTSTEPSEGSAPGSPAGSPTSTEEGTSTEPSEGSAPGTSTEPSEGSAPGTSESATPESGPGTSTEPSEGSAPGTSESATPESGPGSEPATSGSETPGTSTEPSEGSAPGTSTEPSEGSAPGTSESATPESGPGTSESATPESGPGSPAGSPTSTEEGTSESATPESGPGSEPATSGSETPGTSESATPESGPGTSTEPSEGSAPGTSTEPSEGSAPGTSTEPSEGSAPGTSTEPSEGSAPGTSTEPSEGSAPGTSTEPSEGSAPGSPAGSPTSTEEGTSTEPSEGSAPGTSESATPESGPGSEPATSGSETPGTSESATPESGPGSEPATSGSETPGTSESATPESGPGTSTEPSEGSAPGTSESATPESGPGSPAGSPTSTEEGSPAGSPTSTEEGSPAGSPTSTEEGTSESATPESGPGTSTEPSEGSAPGTSESATPESGPGSEPATSGSETPGTSESATPESGPGSEPATSGSETPGTSESATPESGPGTSTEPSEGSAPGSPAGSPTSTEEGTSESATPESGPGSEPATSGSETPGTSESATPESGPGSPAGSPTSTEEGSPAGSPTSTEEGTSTEPSEGSAPGTSESATPESGPGTSESATPESGPGTSESATPESGPGSEPATSGSETPGSEPATSGSETPGSPAGSPTSTEEGTSTEPSEGSAPGTSTEPSEGSAPGSEPATSGSETPGTSESATPESGPGTSTEPSEGAAEPEA

SEQ ID NO: 992 - protein, 1743 aa, Artificial Sequence
  Description of Artificial Sequence: Synthetic polypeptide
HHHHHHSPAGSPTSTEEGTSESATPESGPGTSTEPSEGSAPGTSESATPESGPGSEPATSGSETPGTSESATPESGPGSEPATSGSETPGTSESATPESGPGTSTEPSEGSAPGSPAGSPTSTEEGTSESATPESGPGSEPATSGSETPGTSESATPESGPGSPAGSPTSTEEGSPAGSPTSTEEGTSTEPSEGSAPGTSESATPESGPGTSESATPESGPGTSESATPESGPGSEPATSGSETPGSEPATSGSETPGSPAGSPTSTEEGTSTEPSEGSAPGTSTEPSEGSAPGGSAPEAGRSANHTPAGLTGPATSGSETPGTDIQMTQSPSSLSASVGDRVTITCQASQDISNYLNWYQQKPGKAPKLLIYDASNLETGVPSRFSGSGSGTDFTFTISSLQPEDTATYFCQHFDHLPLAFGGGTKVEIKGATPPETGAETESPGETTGGSAESEPPGEGQVQLQESGPGAVKPSETLSLTCTVSGGSVSSGDYYWTWIRQSPGKGLEWIGHIYYSGNTNYNPSLKSRLTISIDTSKTQFSLKLSSVTAADTATYYCVRDRVTGAFDIWGQGTTVTVSSGGGGSELVVTQEPSLTVSPGGTVTLTCRSSTGAVTTSNYANWVQQKPGQAPRGLIGGTNKRAPGTPARFSGSSLGGSAALTLSGVQPEDEAEYYCALWYSNLWVFGGGTKLTVLGATPPETGAETESPGETTGGSAESEPPGEGEVQLQESGGGLVQPGGSLKLSCAASGFTFNTYAMNWVRQAPGKGLEWVARIRSKYNNYATYYADSVKDRFTISRDDSKNTAYLQMNNLKTEDTAVYYCVRHGNFGNSYVSWFAYWGQGTLVTVSSGTAEAASASGEAGRSANHTPAGLTGPPGSPAGSPTSTEEGTSESATPESGPGTSTEPSEGSAPGSPAGSPTSTEEGTSTEPSEGSAPGTSTEPSEGSAPGTSESATPESGPGSEPATSGSETPGSEPATSGSETPGSPAGSPTSTEEGTSESATPESGPGTSTEPSEGSAPGTSTEPSEGSAPGSPAGSPTSTEEGTSTEPSEGSAPGTSTEPSEGSAPGTSESATPESGPGTSTEPSEGSAPGTSESATPESGPGSEPATSGSETPGTSTEPSEGSAPGTSTEPSEGSAPGTSESATPESGPGTSESATPESGPGSPAGSPTSTEEGTSESATPESGPGSEPATSGSETPGTSESATPESGPGTSTEPSEGSAPGTSTEPSEGSAPGTSTEPSEGSAPGTSTEPSEGSAPGTSTEPSEGSAPGTSTEPSEGSAPGSPAGSPTSTEEGTSTEPSEGSAPGTSESATPESGPGSEPATSGSETPGTSESATPESGPGSEPATSGSETPGTSESATPESGPGTSTEPSEGSAPGTSESATPESGPGSPAGSPTSTEEGSPAGSPTSTEEGSPAGSPTSTEEGTSESATPESGPGTSTEPSEGSAPGTSESATPESGPGSEPATSGSETPGTSESATPESGPGSEPATSGSETPGTSESATPESGPGTSTEPSEGSAPGSPAGSPTSTEEGTSESATPESGPGSEPATSGSETPGTSESATPESGPGSPAGSPTSTEEGSPAGSPTSTEEGTSTEPSEGSAPGTSESATPESGPGTSESATPESGPGTSESATPESGPGSEPATSGSETPGSEPATSGSETPGSPAGSPTSTEEGTSTEPSEGSAPGTSTEPSEGSAPGSEPATSGSETPGTSESATPESGPGTSTEPSEGAAEPEA

SEQ ID NO: 993 - protein, 1743 aa, Artificial Sequence
  Description of Artificial Sequence: Synthetic polypeptide
HHHHHHSPAGSPTSTEEGTSESATPESGPGTSTEPSEGSAPGTSESATPESGPGSEPATSGSETPGTSESATPESGPGSEPATSGSETPGTSESATPESGPGTSTEPSEGSAPGSPAGSPTSTEEGTSESATPESGPGSEPATSGSETPGTSESATPESGPGSPAGSPTSTEEGSPAGSPTSTEEGTSTEPSEGSAPGTSESATPESGPGTSESATPESGPGTSESATPESGPGSEPATSGSETPGSEPATSGSETPGSPAGSPTSTEEGTSTEPSEGSAPGTSTEPSEGSAPGGSAPEAGRSANHTPAGLTGPATSGSETPGTDIQMTQSPSSLSASVGDRVTITCQASQDISNYLNWYQQKPGKAPKLLIYDASNLETGVPSRFSGSGSGTDFTFTISSLQPEDTATYFCQHFDHLPLAFGGGTKVEIKGATPPETGAETESPGETTGGSAESEPPGEGQVQLQESGPGLVKPSQTLSLTCTVSGGSVSSGDYYWTWIRQRPGKGLEWIGHIYYSGNTNYNPSLKSRLTISIDTSKTQFSLKLSSVTAADTAIYYCVRDRVTGAFDIWGQGTMVTVSSGGGGSELVVTQEPSLTVSPGGTVTLTCRSSTGAVTTSNYANWVQQKPGQAPRGLIGGTNKRAPGTPARFSGSSLGGSAALTLSGVQPEDEAEYYCALWYSNLWVFGGGTKLTVLGATPPETGAETESPGETTGGSAESEPPGEGEVQLQESGGGLVQPGGSLKLSCAASGFTFNTYAMNWVRQAPGKGLEWVARIRSKYNNYATYYADSVKDRFTISRDDSKNTAYLQMNNLKTEDTAVYYCVRHGNFGNSYVSWFAYWGQGTLVTVSSGTAEAASASGEAGRSANHTPAGLTGPPGSPAGSPTSTEEGTSESATPESGPGTSTEPSEGSAPGSPAGSPTSTEEGTSTEPSEGSAPGTSTEPSEGSAPGTSESATPESGPGSEPATSGSETPGSEPATSGSETPGSPAGSPTSTEEGTSESATPESGPGTSTEPSEGSAPGTSTEPSEGSAPGSPAGSPTSTEEGTSTEPSEGSAPGTSTEPSEGSAPGTSESATPESGPGTSTEPSEGSAPGTSESATPESGPGSEPATSGSETPGTSTEPSEGSAPGTSTEPSEGSAPGTSESATPESGPGTSESATPESGPGSPAGSPTSTEEGTSESATPESGPGSEPATSGSETPGTSESATPESGPGTSTEPSEGSAPGTSTEPSEGSAPGTSTEPSEGSAPGTSTEPSEGSAPGTSTEPSEGSAPGTSTEPSEGSAPGSPAGSPTSTEEGTSTEPSEGSAPGTSESATPESGPGSEPATSGSETPGTSESATPESGPGSEPATSGSETPGTSESATPESGPGTSTEPSEGSAPGTSESATPESGPGSPAGSPTSTEEGSPAGSPTSTEEGSPAGSPTSTEEGTSESATPESGPGTSTEPSEGSAPGTSESATPESGPGSEPATSGSETPGTSESATPESGPGSEPATSGSETPGTSESATPESGPGTSTEPSEGSAPGSPAGSPTSTEEGTSESATPESGPGSEPATSGSETPGTSESATPESGPGSPAGSPTSTEEGSPAGSPTSTEEGTSTEPSEGSAPGTSESATPESGPGTSESATPESGPGTSESATPESGPGSEPATSGSETPGSEPATSGSETPGSPAGSPTSTEEGTSTEPSEGSAPGTSTEPSEGSAPGSEPATSGSETPGTSESATPESGPGTSTEPSEGAAEPEA

SEQ ID NO: 994 - protein, 1743 aa, Artificial Sequence
  Description of Artificial Sequence: Synthetic polypeptide
HHHHHHSPAGSPTSTEEGTSESATPESGPGTSTEPSEGSAPGTSESATPESGPGSEPATSGSETPGTSESATPESGPGSEPATSGSETPGTSESATPESGPGTSTEPSEGSAPGSPAGSPTSTEEGTSESATPESGPGSEPATSGSETPGTSESATPESGPGSPAGSPTSTEEGSPAGSPTSTEEGTSTEPSEGSAPGTSESATPESGPGTSESATPESGPGTSESATPESGPGSEPATSGSETPGSEPATSGSETPGSPAGSPTSTEEGTSTEPSEGSAPGTSTEPSEGSAPGGSAPEAGRSANHTPAGLTGPATSGSETPGTDIQMTQSPSSLSASVGDRVTITCQASQDISNYLNWYQQKPGKAPKLLIYDASNLETGVPSRFSGSGSGTDFTFTISSLQPEDTATYFCQHFDHLPLAFGGGTKVEIKGATPPETGAETESPGETTGGSAESEPPGEGQVQLQESGPGAVKPSQTLSLTCTVSGGSVSSGDYYWTWIRQRPGKGLEWIGHIYYSGNTNYNPSLKSRLTISIDTSKTQFSLKLSSVTAADTATYYCVRDRVTGAFDIWGQGTAVTVSSGGGGSELVVTQEPSLTVSPGGTVTLTCRSSTGAVTTSNYANWVQQKPGQAPRGLIGGTNKRAPGTPARFSGSSLGGSAALTLSGVQPEDEAEYYCALWYSNLWVFGGGTKLTVLGATPPETGAETESPGETTGGSAESEPPGEGEVQLQESGGGLVQPGGSLKLSCAASGFTFNTYAMNWVRQAPGKGLEWVARIRSKYNNYATYYADSVKDRFTISRDDSKNTAYLQMNNLKTEDTAVYYCVRHGNFGNSYVSWFAYWGQGTLVTVSSGTAEAASASGEAGRSANHTPAGLTGPPGSPAGSPTSTEEGTSESATPESGPGTSTEPSEGSAPGSPAGSPTSTEEGTSTEPSEGSAPGTSTEPSEGSAPGTSESATPESGPGSEPATSGSETPGSEPATSGSETPGSPAGSPTSTEEGTSESATPESGPGTSTEPSEGSAPGTSTEPSEGSAPGSPAGSPTSTEEGTSTEPSEGSAPGTSTEPSEGSAPGTSESATPESGPGTSTEPSEGSAPGTSESATPESGPGSEPATSGSETPGTSTEPSEGSAPGTSTEPSEGSAPGTSESATPESGPGTSESATPESGPGSPAGSPTSTEEGTSESATPESGPGSEPATSGSETPGTSESATPESGPGTSTEPSEGSAPGTSTEPSEGSAPGTSTEPSEGSAPGTSTEPSEGSAPGTSTEPSEGSAPGTSTEPSEGSAPGSPAGSPTSTEEGTSTEPSEGSAPGTSESATPESGPGSEPATSGSETPGTSESATPESGPGSEPATSGSETPGTSESATPESGPGTSTEPSEGSAPGTSESATPESGPGSPAGSPTSTEEGSPAGSPTSTEEGSPAGSPTSTEEGTSESATPESGPGTSTEPSEGSAPGTSESATPESGPGSEPATSGSETPGTSESATPESGPGSEPATSGSETPGTSESATPESGPGTSTEPSEGSAPGSPAGSPTSTEEGTSESATPESGPGSEPATSGSETPGTSESATPESGPGSPAGSPTSTEEGSPAGSPTSTEEGTSTEPSEGSAPGTSESATPESGPGTSESATPESGPGTSESATPESGPGSEPATSGSETPGSEPATSGSETPGSPAGSPTSTEEGTSTEPSEGSAPGTSTEPSEGSAPGSEPATSGSETPGTSESATPESGPGTSTEPSEGAAEPEA

SEQ ID NO: 995 - protein, 1743 aa, Artificial Sequence
  Description of Artificial Sequence: Synthetic polypeptide
HHHHHHSPAGSPTSTEEGTSESATPESGPGTSTEPSEGSAPGTSESATPESGPGSEPATSGSETPGTSESATPESGPGSEPATSGSETPGTSESATPESGPGTSTEPSEGSAPGSPAGSPTSTEEGTSESATPESGPGSEPATSGSETPGTSESATPESGPGSPAGSPTSTEEGSPAGSPTSTEEGTSTEPSEGSAPGTSESATPESGPGTSESATPESGPGTSESATPESGPGSEPATSGSETPGSEPATSGSETPGSPAGSPTSTEEGTSTEPSEGSAPGTSTEPSEGSAPGGSAPEAGRSANHTPAGLTGPATSGSETPGTDIQMTQSPSSLSASVGDRVTITCQASQDISNYLNWYQQKPGKAPKLLIYDASNLETGVPSRFSGSGSGTDFTFTISSLQPEDTATYFCQHFDHLPLAFGGGTKVEIKGATPPETGAETESPGETTGGSAESEPPGEGQVQLQESGPGAVKPSQTLSLTCTVSGGSVSSGDYYWTWIRQRPGKGLEWIGHIYYSGNTNYNPSLKSRLTISIDTSKTQFSLKLSSVTAADTATYYCVRDRVTGAFDIWGQGTTVTVSSGGGGSELVVTQEPSLTVSPGGTVTLTCRSSTGAVTTSNYANWVQQKPGQAPRGLIGGTNKRAPGTPARFSGSSLGGSAALTLSGVQPEDEAEYYCALWYSNLWVFGGGTKLTVLGATPPETGAETESPGETTGGSAESEPPGEGEVQLQESGGGLVQPGGSLKLSCAASGFTFNTYAMNWVRQAPGKGLEWVARIRSKYNNYATYYADSVKDRFTISRDDSKNTAYLQMNNLKTEDTAVYYCVRHGNFGNSYVSWFAYWGQGTLVTVSSGTAEAASASGEAGRSANHTPAGLTGPPGSPAGSPTSTEEGTSESATPESGPGTSTEPSEGSAPGSPAGSPTSTEEGTSTEPSEGSAPGTSTEPSEGSAPGTSESATPESGPGSEPATSGSETPGSEPATSGSETPGSPAGSPTSTEEGTSESATPESGPGTSTEPSEGSAPGTSTEPSEGSAPGSPAGSPTSTEEGTSTEPSEGSAPGTSTEPSEGSAPGTSESATPESGPGTSTEPSEGSAPGTSESATPESGPGSEPATSGSETPGTSTEPSEGSAPGTSTEPSEGSAPGTSESATPESGPGTSESATPESGPGSPAGSPTSTEEGTSESATPESGPGSEPATSGSETPGTSESATPESGPGTSTEPSEGSAPGTSTEPSEGSAPGTSTEPSEGSAPGTSTEPSEGSAPGTSTEPSEGSAPGTSTEPSEGSAPGSPAGSPTSTEEGTSTEPSEGSAPGTSESATPESGPGSEPATSGSETPGTSESATPESGPGSEPATSGSETPGTSESATPESGPGTSTEPSEGSAPGTSESATPESGPGSPAGSPTSTEEGSPAGSPTSTEEGSPAGSPTSTEEGTSESATPESGPGTSTEPSEGSAPGTSESATPESGPGSEPATSGSETPGTSESATPESGPGSEPATSGSETPGTSESATPESGPGTSTEPSEGSAPGSPAGSPTSTEEGTSESATPESGPGSEPATSGSETPGTSESATPESGPGSPAGSPTSTEEGSPAGSPTSTEEGTSTEPSEGSAPGTSESATPESGPGTSESATPESGPGTSESATPESGPGSEPATSGSETPGSEPATSGSETPGSPAGSPTSTEEGTSTEPSEGSAPGTSTEPSEGSAPGSEPATSGSETPGTSESATPESGPGTSTEPSEGAAEPEA

SEQ ID NO: 996 - protein, 1743 aa, Artificial Sequence
  Description of Artificial Sequence: Synthetic polypeptide
HHHHHHSPAGSPTSTEEGTSESATPESGPGTSTEPSEGSAPGTSESATPESGPGSEPATSGSETPGTSESATPESGPGSEPATSGSETPGTSESATPESGPGTSTEPSEGSAPGSPAGSPTSTEEGTSESATPESGPGSEPATSGSETPGTSESATPESGPGSPAGSPTSTEEGSPAGSPTSTEEGTSTEPSEGSAPGTSESATPESGPGTSESATPESGPGTSESATPESGPGSEPATSGSETPGSEPATSGSETPGSPAGSPTSTEEGTSTEPSEGSAPGTSTEPSEGSAPGGSAPEAGRSANHTPAGLTGPATSGSETPGTDIQMTQSPSSLSASVGDRVTITCQASQDISNYLNWYQQKPGKAPKLLIYDASNLETGVPSRFSGSGSGTDFTFTISRLQPEDIATYFCQHFDHLPLAFGGGTKVEIKGATPPETGAETESPGETTGGSAESEPPGEGQVQLQESGPGAVKPSETLSLTCTVSGGSVSSGDYYWTWIRQSPGKGLEWIGHIYYSGNTNYNPSLKSRLTISIDTSKTQFSLKLSSVTAADTATYYCVRDRVTGAFDIWGQGTAVTVSSGGGGSELVVTQEPSLTVSPGGTVTLTCRSSTGAVTTSNYANWVQQKPGQAPRGLIGGTNKRAPGTPARFSGSSLGGSAALTLSGVQPEDEAEYYCALWYSNLWVFGGGTKLTVLGATPPETGAETESPGETTGGSAESEPPGEGEVQLQESGGGLVQPGGSLKLSCAASGFTFNTYAMNWVRQAPGKGLEWVARIRSKYNNYATYYADSVKDRFTISRDDSKNTAYLQMNNLKTEDTAVYYCVRHGNFGNSYVSWFAYWGQGTLVTVSSGTAEAASASGEAGRSANHTPAGLTGPPGSPAGSPTSTEEGTSESATPESGPGTSTEPSEGSAPGSPAGSPTSTEEGTSTEPSEGSAPGTSTEPSEGSAPGTSESATPESGPGSEPATSGSETPGSEPATSGSETPGSPAGSPTSTEEGTSESATPESGPGTSTEPSEGSAPGTSTEPSEGSAPGSPAGSPTSTEEGTSTEPSEGSAPGTSTEPSEGSAPGTSESATPESGPGTSTEPSEGSAPGTSESATPESGPGSEPATSGSETPGTSTEPSEGSAPGTSTEPSEGSAPGTSESATPESGPGTSESATPESGPGSPAGSPTSTEEGTSESATPESGPGSEPATSGSETPGTSESATPESGPGTSTEPSEGSAPGTSTEPSEGSAPGTSTEPSEGSAPGTSTEPSEGSAPGTSTEPSEGSAPGTSTEPSEGSAPGSPAGSPTSTEEGTSTEPSEGSAPGTSESATPESGPGSEPATSGSETPGTSESATPESGPGSEPATSGSETPGTSESATPESGPGTSTEPSEGSAPGTSESATPESGPGSPAGSPTSTEEGSPAGSPTSTEEGSPAGSPTSTEEGTSESATPESGPGTSTEPSEGSAPGTSESATPESGPGSEPATSGSETPGTSESATPESGPGSEPATSGSETPGTSESATPESGPGTSTEPSEGSAPGSPAGSPTSTEEGTSESATPESGPGSEPATSGSETPGTSESATPESGPGSPAGSPTSTEEGSPAGSPTSTEEGTSTEPSEGSAPGTSESATPESGPGTSESATPESGPGTSESATPESGPGSEPATSGSETPGSEPATSGSETPGSPAGSPTSTEEGTSTEPSEGSAPGTSTEPSEGSAPGSEPATSGSETPGTSESATPESGPGTSTEPSEGAAEPEA

SEQ ID NO: 997 - protein, 1743 aa, Artificial Sequence
  Description of Artificial Sequence: Synthetic polypeptide
HHHHHHSPAGSPTSTEEGTSESATPESGPGTSTEPSEGSAPGTSESATPESGPGSEPATSGSETPGTSESATPESGPGSEPATSGSETPGTSESATPESGPGTSTEPSEGSAPGSPAGSPTSTEEGTSESATPESGPGSEPATSGSETPGTSESATPESGPGSPAGSPTSTEEGSPAGSPTSTEEGTSTEPSEGSAPGTSESATPESGPGTSESATPESGPGTSESATPESGPGSEPATSGSETPGSEPATSGSETPGSPAGSPTSTEEGTSTEPSEGSAPGTSTEPSEGSAPGGSAPEAGRSANHTPAGLTGPATSGSETPGTDIQMTQSPSSLSASVGDRVTITCQASQDISNYLNWYQQKPGKAPKLLIYDASNLETGVPSRFSGSGSGTDFTFTISRLQPEDIATYFCQHFDHLPLAFGGGTKVEIKGATPPETGAETESPGETTGGSAESEPPGEGQVQLQESGPGAVKPSETLSLTCTVSGGSVSSGDYYWTWIRQSPGKGLEWIGHIYYSGNTNYNPSLKSRLTISIDTSKTQFSLKLSSVTAADTATYYCVRDRVTGAFDIWGQGTTVTVSSGGGGSELVVTQEPSLTVSPGGTVTLTCRSSTGAVTTSNYANWVQQKPGQAPRGLIGGTNKRAPGTPARFSGSSLGGSAALTLSGVQPEDEAEYYCALWYSNLWVFGGGTKLTVLGATPPETGAETESPGETTGGSAESEPPGEGEVQLQESGGGLVQPGGSLKLSCAASGFTFNTYAMNWVRQAPGKGLEWVARIRSKYNNYATYYADSVKDRFTISRDDSKNTAYLQMNNLKTEDTAVYYCVRHGNFGNSYVSWFAYWGQGTLVTVSSGTAEAASASGEAGRSANHTPAGLTGPPGSPAGSPTSTEEGTSESATPESGPGTSTEPSEGSAPGSPAGSPTSTEEGTSTEPSEGSAPGTSTEPSEGSAPGTSESATPESGPGSEPATSGSETPGSEPATSGSETPGSPAGSPTSTEEGTSESATPESGPGTSTEPSEGSAPGTSTEPSEGSAPGSPAGSPTSTEEGTSTEPSEGSAPGTSTEPSEGSAPGTSESATPESGPGTSTEPSEGSAPGTSESATPESGPGSEPATSGSETPGTSTEPSEGSAPGTSTEPSEGSAPGTSESATPESGPGTSESATPESGPGSPAGSPTSTEEGTSESATPESGPGSEPATSGSETPGTSESATPESGPGTSTEPSEGSAPGTSTEPSEGSAPGTSTEPSEGSAPGTSTEPSEGSAPGTSTEPSEGSAPGTSTEPSEGSAPGSPAGSPTSTEEGTSTEPSEGSAPGTSESATPESGPGSEPATSGSETPGTSESATPESGPGSEPATSGSETPGTSESATPESGPGTSTEPSEGSAPGTSESATPESGPGSPAGSPTSTEEGSPAGSPTSTEEGSPAGSPTSTEEGTSESATPESGPGTSTEPSEGSAPGTSESATPESGPGSEPATSGSETPGTSESATPESGPGSEPATSGSETPGTSESATPESGPGTSTEPSEGSAPGSPAGSPTSTEEGTSESATPESGPGSEPATSGSETPGTSESATPESGPGSPAGSPTSTEEGSPAGSPTSTEEGTSTEPSEGSAPGTSESATPESGPGTSESATPESGPGTSESATPESGPGSEPATSGSETPGSEPATSGSETPGSPAGSPTSTEEGTSTEPSEGSAPGTSTEPSEGSAPGSEPATSGSETPGTSESATPESGPGTSTEPSEGAAEPEA

SEQ ID NO: 998 - protein, 1743 aa, Artificial Sequence
  Description of Artificial Sequence: Synthetic polypeptide
HHHHHHSPAGSPTSTEEGTSESATPESGPGTSTEPSEGSAPGTSESATPESGPGSEPATSGSETPGTSESATPESGPGSEPATSGSETPGTSESATPESGPGTSTEPSEGSAPGSPAGSPTSTEEGTSESATPESGPGSEPATSGSETPGTSESATPESGPGSPAGSPTSTEEGSPAGSPTSTEEGTSTEPSEGSAPGTSESATPESGPGTSESATPESGPGTSESATPESGPGSEPATSGSETPGSEPATSGSETPGSPAGSPTSTEEGTSTEPSEGSAPGTSTEPSEGSAPGGSAPEAGRSANHTPAGLTGPATSGSETPGTDIQMTQSPSSLSASVGDRVTITCQASQDISNYLNWYQQKPGKAPKLLIYDASNLETGVPSRFSGSGSGTDFTFTISRLQPEDIATYFCQHFDHLPLAFGGGTKVEIKGATPPETGAETESPGETTGGSAESEPPGEGQVQLQESGPGLVKPSQTLSLTCTVSGGSVSSGDYYWTWIRQRPGKGLEWIGHIYYSGNTNYNPSLKSRLTISIDTSKTQFSLKLSSVTAADTAIYYCVRDRVTGAFDIWGQGTMVTVSSGGGGSELVVTQEPSLTVSPGGTVTLTCRSSTGAVTTSNYANWVQQKPGQAPRGLIGGTNKRAPGTPARFSGSSLGGSAALTLSGVQPEDEAEYYCALWYSNLWVFGGGTKLTVLGATPPETGAETESPGETTGGSAESEPPGEGEVQLQESGGGLVQPGGSLKLSCAASGFTFNTYAMNWVRQAPGKGLEWVARIRSKYNNYATYYADSVKDRFTISRDDSKNTAYLQMNNLKTEDTAVYYCVRHGNFGNSYVSWFAYWGQGTLVTVSSGTAEAASASGEAGRSANHTPAGLTGPPGSPAGSPTSTEEGTSESATPESGPGTSTEPSEGSAPGSPAGSPTSTEEGTSTEPSEGSAPGTSTEPSEGSAPGTSESATPESGPGSEPATSGSETPGSEPATSGSETPGSPAGSPTSTEEGTSESATPESGPGTSTEPSEGSAPGTSTEPSEGSAPGSPAGSPTSTEEGTSTEPSEGSAPGTSTEPSEGSAPGTSESATPESGPGTSTEPSEGSAPGTSESATPESGPGSEPATSGSETPGTSTEPSEGSAPGTSTEPSEGSAPGTSESATPESGPGTSESATPESGPGSPAGSPTSTEEGTSESATPESGPGSEPATSGSETPGTSESATPESGPGTSTEPSEGSAPGTSTEPSEGSAPGTSTEPSEGSAPGTSTEPSEGSAPGTSTEPSEGSAPGTSTEPSEGSAPGSPAGSPTSTEEGTSTEPSEGSAPGTSESATPESGPGSEPATSGSETPGTSESATPESGPGSEPATSGSETPGTSESATPESGPGTSTEPSEGSAPGTSESATPESGPGSPAGSPTSTEEGSPAGSPTSTEEGSPAGSPTSTEEGTSESATPESGPGTSTEPSEGSAPGTSESATPESGPGSEPATSGSETPGTSESATPESGPGSEPATSGSETPGTSESATPESGPGTSTEPSEGSAPGSPAGSPTSTEEGTSESATPESGPGSEPATSGSETPGTSESATPESGPGSPAGSPTSTEEGSPAGSPTSTEEGTSTEPSEGSAPGTSESATPESGPGTSESATPESGPGTSESATPESGPGSEPATSGSETPGSEPATSGSETPGSPAGSPTSTEEGTSTEPSEGSAPGTSTEPSEGSAPGSEPATSGSETPGTSESATPESGPGTSTEPSEGAAEPEA

SEQ ID NO: 999 - protein, 1743 aa, Artificial Sequence
  Description of Artificial Sequence: Synthetic polypeptide
HHHHHHSPAGSPTSTEEGTSESATPESGPGTSTEPSEGSAPGTSESATPESGPGSEPATSGSETPGTSESATPESGPGSEPATSGSETPGTSESATPESGPGTSTEPSEGSAPGSPAGSPTSTEEGTSESATPESGPGSEPATSGSETPGTSESATPESGPGSPAGSPTSTEEGSPAGSPTSTEEGTSTEPSEGSAPGTSESATPESGPGTSESATPESGPGTSESATPESGPGSEPATSGSETPGSEPATSGSETPGSPAGSPTSTEEGTSTEPSEGSAPGTSTEPSEGSAPGGSAPEAGRSANHTPAGLTGPATSGSETPGTDIQMTQSPSSLSASVGDRVTITCQASQDISNYLNWYQQKPGKAPKLLIYDASNLETGVPSRFSGSGSGTDFTFTISRLQPEDIATYFCQHFDHLPLAFGGGTKVEIKGATPPETGAETESPGETTGGSAESEPPGEGQVQLQESGPGAVKPSQTLSLTCTVSGGSVSSGDYYWTWIRQRPGKGLEWIGHIYYSGNTNYNPSLKSRLTISIDTSKTQFSLKLSSVTAADTATYYCVRDRVTGAFDIWGQGTAVTVSSGGGGSELVVTQEPSLTVSPGGTVTLTCRSSTGAVTTSNYANWVQQKPGQAPRGLIGGTNKRAPGTPARFSGSSLGGSAALTLSGVQPEDEAEYYCALWYSNLWVFGGGTKLTVLGATPPETGAETESPGETTGGSAESEPPGEGEVQLQESGGGLVQPGGSLKLSCAASGFTFNTYAMNWVRQAPGKGLEWVARIRSKYNNYATYYADSVKDRFTISRDDSKNTAYLQMNNLKTEDTAVYYCVRHGNFGNSYVSWFAYWGQGTLVTVSSGTAEAASASGEAGRSANHTPAGLTGPPGSPAGSPTSTEEGTSESATPESGPGTSTEPSEGSAPGSPAGSPTSTEEGTSTEPSEGSAPGTSTEPSEGSAPGTSESATPESGPGSEPATSGSETPGSEPATSGSETPGSPAGSPTSTEEGTSESATPESGPGTSTEPSEGSAPGTSTEPSEGSAPGSPAGSPTSTEEGTSTEPSEGSAPGTSTEPSEGSAPGTSESATPESGPGTSTEPSEGSAPGTSESATPESGPGSEPATSGSETPGTSTEPSEGSAPGTSTEPSEGSAPGTSESATPESGPGTSESATPESGPGSPAGSPTSTEEGTSESATPESGPGSEPATSGSETPGTSESATPESGPGTSTEPSEGSAPGTSTEPSEGSAPGTSTEPSEGSAPGTSTEPSEGSAPGTSTEPSEGSAPGTSTEPSEGSAPGSPAGSPTSTEEGTSTEPSEGSAPGTSESATPESGPGSEPATSGSETPGTSESATPESGPGSEPATSGSETPGTSESATPESGPGTSTEPSEGSAPGTSESATPESGPGSPAGSPTSTEEGSPAGSPTSTEEGSPAGSPTSTEEGTSESATPESGPGTSTEPSEGSAPGTSESATPESGPGSEPATSGSETPGTSESATPESGPGSEPATSGSETPGTSESATPESGPGTSTEPSEGSAPGSPAGSPTSTEEGTSESATPESGPGSEPATSGSETPGTSESATPESGPGSPAGSPTSTEEGSPAGSPTSTEEGTSTEPSEGSAPGTSESATPESGPGTSESATPESGPGTSESATPESGPGSEPATSGSETPGSEPATSGSETPGSPAGSPTSTEEGTSTEPSEGSAPGTSTEPSEGSAPGSEPATSGSETPGTSESATPESGPGTSTEPSEGAAEPEA

SEQ ID NO: 1000 - protein, 1743 aa, Artificial Sequence
  Description of Artificial Sequence: Synthetic polypeptide
HHHHHHSPAGSPTSTEEGTSESATPESGPGTSTEPSEGSAPGTSESATPESGPGSEPATSGSETPGTSESATPESGPGSEPATSGSETPGTSESATPESGPGTSTEPSEGSAPGSPAGSPTSTEEGTSESATPESGPGSEPATSGSETPGTSESATPESGPGSPAGSPTSTEEGSPAGSPTSTEEGTSTEPSEGSAPGTSESATPESGPGTSESATPESGPGTSESATPESGPGSEPATSGSETPGSEPATSGSETPGSPAGSPTSTEEGTSTEPSEGSAPGTSTEPSEGSAPGGSAPEAGRSANHTPAGLTGPATSGSETPGTDIQMTQSPSSLSASVGDRVTITCQASQDISNYLNWYQQKPGKAPKLLIYDASNLETGVPSRFSGSGSGTDFTFTISRLQPEDIATYFCQHFDHLPLAFGGGTKVEIKGATPPETGAETESPGETTGGSAESEPPGEGQVQLQESGPGAVKPSQTLSLTCTVSGGSVSSGDYYWTWIRQRPGKGLEWIGHIYYSGNTNYNPSLKSRLTISIDTSKTQFSLKLSSVTAADTATYYCVRDRVTGAFDIWGQGTTVTVSSGGGGSELVVTQEPSLTVSPGGTVTLTCRSSTGAVTTSNYANWVQQKPGQAPRGLIGGTNKRAPGTPARFSGSSLGGSAALTLSGVQPEDEAEYYCALWYSNLWVFGGGTKLTVLGATPPETGAETESPGETTGGSAESEPPGEGEVQLQESGGGLVQPGGSLKLSCAASGFTFNTYAMNWVRQAPGKGLEWVARIRSKYNNYATYYADSVKDRFTISRDDSKNTAYLQMNNLKTEDTAVYYCVRHGNFGNSYVSWFAYWGQGTLVTVSSGTAEAASASGEAGRSANHTPAGLTGPPGSPAGSPTSTEEGTSESATPESGPGTSTEPSEGSAPGSPAGSPTSTEEGTSTEPSEGSAPGTSTEPSEGSAPGTSESATPESGPGSEPATSGSETPGSEPATSGSETPGSPAGSPTSTEEGTSESATPESGPGTSTEPSEGSAPGTSTEPSEGSAPGSPAGSPTSTEEGTSTEPSEGSAPGTSTEPSEGSAPGTSESATPESGPGTSTEPSEGSAPGTSESATPESGPGSEPATSGSETPGTSTEPSEGSAPGTSTEPSEGSAPGTSESATPESGPGTSESATPESGPGSPAGSPTSTEEGTSESATPESGPGSEPATSGSETPGTSESATPESGPGTSTEPSEGSAPGTSTEPSEGSAPGTSTEPSEGSAPGTSTEPSEGSAPGTSTEPSEGSAPGTSTEPSEGSAPGSPAGSPTSTEEGTSTEPSEGSAPGTSESATPESGPGSEPATSGSETPGTSESATPESGPGSEPATSGSETPGTSESATPESGPGTSTEPSEGSAPGTSESATPESGPGSPAGSPTSTEEGSPAGSPTSTEEGSPAGSPTSTEEGTSESATPESGPGTSTEPSEGSAPGTSESATPESGPGSEPATSGSETPGTSESATPESGPGSEPATSGSETPGTSESATPESGPGTSTEPSEGSAPGSPAGSPTSTEEGTSESATPESGPGSEPATSGSETPGTSESATPESGPGSPAGSPTSTEEGSPAGSPTSTEEGTSTEPSEGSAPGTSESATPESGPGTSESATPESGPGTSESATPESGPGSEPATSGSETPGSEPATSGSETPGSPAGSPTSTEEGTSTEPSEGSAPGTSTEPSEGSAPGSEPATSGSETPGTSESATPESGPGTSTEPSEGAAEPEA

SEQ ID NO: 1001 - protein, 1743 aa, Artificial Sequence
  Description of Artificial Sequence: Synthetic polypeptide
HHHHHHSPAGSPTSTEEGTSESATPESGPGTSTEPSEGSAPGTSESATPESGPGSEPATSGSETPGTSESATPESGPGSEPATSGSETPGTSESATPESGPGTSTEPSEGSAPGSPAGSPTSTEEGTSESATPESGPGSEPATSGSETPGTSESATPESGPGSPAGSPTSTEEGSPAGSPTSTEEGTSTEPSEGSAPGTSESATPESGPGTSESATPESGPGTSESATPESGPGSEPATSGSETPGSEPATSGSETPGSPAGSPTSTEEGTSTEPSEGSAPGTSTEPSEGSAPGGSAPEAGRSANHTPAGLTGPATSGSETPGTDIQMTQSPSSLSASVGDRVTITCQASQDISNYLNWYQQKPGKAPKLLIYDASNLETGVPSRFSGSGSGTDFTFTISRLQPEDTATYFCQHFDHLPLAFGGGTKVEIKGATPPETGAETESPGETTGGSAESEPPGEGQVQLQESGPGAVKPSETLSLTCTVSGGSVSSGDYYWTWIRQSPGKGLEWIGHIYYSGNTNYNPSLKSRLTISIDTSKTQFSLKLSSVTAADTATYYCVRDRVTGAFDIWGQGTAVTVSSGGGGSELVVTQEPSLTVSPGGTVTLTCRSSTGAVTTSNYANWVQQKPGQAPRGLIGGTNKRAPGTPARFSGSSLGGSAALTLSGVQPEDEAEYYCALWYSNLWVFGGGTKLTVLGATPPETGAETESPGETTGGSAESEPPGEGEVQLQESGGGLVQPGGSLKLSCAASGFTFNTYAMNWVRQAPGKGLEWVARIRSKYNNYATYYADSVKDRFTISRDDSKNTAYLQMNNLKTEDTAVYYCVRHGNFGNSYVSWFAYWGQGTLVTVSSGTAEAASASGEAGRSANHTPAGLTGPPGSPAGSPTSTEEGTSESATPESGPGTSTEPSEGSAPGSPAGSPTSTEEGTSTEPSEGSAPGTSTEPSEGSAPGTSESATPESGPGSEPATSGSETPGSEPATSGSETPGSPAGSPTSTEEGTSESATPESGPGTSTEPSEGSAPGTSTEPSEGSAPGSPAGSPTSTEEGTSTEPSEGSAPGTSTEPSEGSAPGTSESATPESGPGTSTEPSEGSAPGTSESATPESGPGSEPATSGSETPGTSTEPSEGSAPGTSTEPSEGSAPGTSESATPESGPGTSESATPESGPGSPAGSPTSTEEGTSESATPESGPGSEPATSGSETPGTSESATPESGPGTSTEPSEGSAPGTSTEPSEGSAPGTSTEPSEGSAPGTSTEPSEGSAPGTSTEPSEGSAPGTSTEPSEGSAPGSPAGSPTSTEEGTSTEPSEGSAPGTSESATPESGPGSEPATSGSETPGTSESATPESGPGSEPATSGSETPGTSESATPESGPGTSTEPSEGSAPGTSESATPESGPGSPAGSPTSTEEGSPAGSPTSTEEGSPAGSPTSTEEGTSESATPESGPGTSTEPSEGSAPGTSESATPESGPGSEPATSGSETPGTSESATPESGPGSEPATSGSETPGTSESATPESGPGTSTEPSEGSAPGSPAGSPTSTEEGTSESATPESGPGSEPATSGSETPGTSESATPESGPGSPAGSPTSTEEGSPAGSPTSTEEGTSTEPSEGSAPGTSESATPESGPGTSESATPESGPGTSESATPESGPGSEPATSGSETPGSEPATSGSETPGSPAGSPTSTEEGTSTEPSEGSAPGTSTEPSEGSAPGSEPATSGSETPGTSESATPESGPGTSTEPSEGAAEPEA

SEQ ID NO: 1002 - protein, 1743 aa, Artificial Sequence
  Description of Artificial Sequence: Synthetic polypeptide
HHHHHHSPAGSPTSTEEGTSESATPESGPGTSTEPSEGSAPGTSESATPESGPGSEPATSGSETPGTSESATPESGPGSEPATSGSETPGTSESATPESGPGTSTEPSEGSAPGSPAGSPTSTEEGTSESATPESGPGSEPATSGSETPGTSESATPESGPGSPAGSPTSTEEGSPAGSPTSTEEGTSTEPSEGSAPGTSESATPESGPGTSESATPESGPGTSESATPESGPGSEPATSGSETPGSEPATSGSETPGSPAGSPTSTEEGTSTEPSEGSAPGTSTEPSEGSAPGGSAPEAGRSANHTPAGLTGPATSGSETPGTDIQMTQSPSSLSASVGDRVTITCQASQDISNYLNWYQQKPGKAPKLLIYDASNLETGVPSRFSGSGSGTDFTFTISRLQPEDTATYFCQHFDHLPLAFGGGTKVEIKGATPPETGAETESPGETTGGSAESEPPGEGQVQLQESGPGAVKPSETLSLTCTVSGGSVSSGDYYWTWIRQSPGKGLEWIGHIYYSGNTNYNPSLKSRLTISIDTSKTQFSLKLSSVTAADTATYYCVRDRVTGAFDIWGQGTTVTVSSGGGGSELVVTQEPSLTVSPGGTVTLTCRSSTGAVTTSNYANWVQQKPGQAPRGLIGGTNKRAPGTPARFSGSSLGGSAALTLSGVQPEDEAEYYCALWYSNLWVFGGGTKLTVLGATPPETGAETESPGETTGGSAESEPPGEGEVQLQESGGGLVQPGGSLKLSCAASGFTFNTYAMNWVRQAPGKGLEWVARIRSKYNNYATYYADSVKDRFTISRDDSKNTAYLQMNNLKTEDTAVYYCVRHGNFGNSYVSWFAYWGQGTLVTVSSGTAEAASASGEAGRSANHTPAGLTGPPGSPAGSPTSTEEGTSESATPESGPGTSTEPSEGSAPGSPAGSPTSTEEGTSTEPSEGSAPGTSTEPSEGSAPGTSESATPESGPGSEPATSGSETPGSEPATSGSETPGSPAGSPTSTEEGTSESATPESGPGTSTEPSEGSAPGTSTEPSEGSAPGSPAGSPTSTEEGTSTEPSEGSAPGTSTEPSEGSAPGTSESATPESGPGTSTEPSEGSAPGTSESATPESGPGSEPATSGSETPGTSTEPSEGSAPGTSTEPSEGSAPGTSESATPESGPGTSESATPESGPGSPAGSPTSTEEGTSESATPESGPGSEPATSGSETPGTSESATPESGPGTSTEPSEGSAPGTSTEPSEGSAPGTSTEPSEGSAPGTSTEPSEGSAPGTSTEPSEGSAPGTSTEPSEGSAPGSPAGSPTSTEEGTSTEPSEGSAPGTSESATPESGPGSEPATSGSETPGTSESATPESGPGSEPATSGSETPGTSESATPESGPGTSTEPSEGSAPGTSESATPESGPGSPAGSPTSTEEGSPAGSPTSTEEGSPAGSPTSTEEGTSESATPESGPGTSTEPSEGSAPGTSESATPESGPGSEPATSGSETPGTSESATPESGPGSEPATSGSETPGTSESATPESGPGTSTEPSEGSAPGSPAGSPTSTEEGTSESATPESGPGSEPATSGSETPGTSESATPESGPGSPAGSPTSTEEGSPAGSPTSTEEGTSTEPSEGSAPGTSESATPESGPGTSESATPESGPGTSESATPESGPGSEPATSGSETPGSEPATSGSETPGSPAGSPTSTEEGTSTEPSEGSAPGTSTEPSEGSAPGSEPATSGSETPGTSESATPESGPGTSTEPSEGAAEPEA

SEQ ID NO: 1003 - protein, 1743 aa, Artificial Sequence
  Description of Artificial Sequence: Synthetic polypeptide
HHHHHHSPAGSPTSTEEGTSESATPESGPGTSTEPSEGSAPGTSESATPESGPGSEPATSGSETPGTSESATPESGPGSEPATSGSETPGTSESATPESGPGTSTEPSEGSAPGSPAGSPTSTEEGTSESATPESGPGSEPATSGSETPGTSESATPESGPGSPAGSPTSTEEGSPAGSPTSTEEGTSTEPSEGSAPGTSESATPESGPGTSESATPESGPGTSESATPESGPGSEPATSGSETPGSEPATSGSETPGSPAGSPTSTEEGTSTEPSEGSAPGTSTEPSEGSAPGGSAPEAGRSANHTPAGLTGPATSGSETPGTDIQMTQSPSSLSASVGDRVTITCQASQDISNYLNWYQQKPGKAPKLLIYDASNLETGVPSRFSGSGSGTDFTFTISRLQPEDTATYFCQHFDHLPLAFGGGTKVEIKGATPPETGAETESPGETTGGSAESEPPGEGQVQLQESGPGLVKPSQTLSLTCTVSGGSVSSGDYYWTWIRQRPGKGLEWIGHIYYSGNTNYNPSLKSRLTISIDTSKTQFSLKLSSVTAADTAIYYCVRDRVTGAFDIWGQGTMVTVSSGGGGSELVVTQEPSLTVSPGGTVTLTCRSSTGAVTTSNYANWVQQKPGQAPRGLIGGTNKRAPGTPARFSGSSLGGSAALTLSGVQPEDEAEYYCALWYSNLWVFGGGTKLTVLGATPPETGAETESPGETTGGSAESEPPGEGEVQLQESGGGLVQPGGSLKLSCAASGFTFNTYAMNWVRQAPGKGLEWVARIRSKYNNYATYYADSVKDRFTISRDDSKNTAYLQMNNLKTEDTAVYYCVRHGNFGNSYVSWFAYWGQGTLVTVSSGTAEAASASGEAGRSANHTPAGLTGPPGSPAGSPTSTEEGTSESATPESGPGTSTEPSEGSAPGSPAGSPTSTEEGTSTEPSEGSAPGTSTEPSEGSAPGTSESATPESGPGSEPATSGSETPGSEPATSGSETPGSPAGSPTSTEEGTSESATPESGPGTSTEPSEGSAPGTSTEPSEGSAPGSPAGSPTSTEEGTSTEPSEGSAPGTSTEPSEGSAPGTSESATPESGPGTSTEPSEGSAPGTSESATPESGPGSEPATSGSETPGTSTEPSEGSAPGTSTEPSEGSAPGTSESATPESGPGTSESATPESGPGSPAGSPTSTEEGTSESATPESGPGSEPATSGSETPGTSESATPESGPGTSTEPSEGSAPGTSTEPSEGSAPGTSTEPSEGSAPGTSTEPSEGSAPGTSTEPSEGSAPGTSTEPSEGSAPGSPAGSPTSTEEGTSTEPSEGSAPGTSESATPESGPGSEPATSGSETPGTSESATPESGPGSEPATSGSETPGTSESATPESGPGTSTEPSEGSAPGTSESATPESGPGSPAGSPTSTEEGSPAGSPTSTEEGSPAGSPTSTEEGTSESATPESGPGTSTEPSEGSAPGTSESATPESGPGSEPATSGSETPGTSESATPESGPGSEPATSGSETPGTSESATPESGPGTSTEPSEGSAPGSPAGSPTSTEEGTSESATPESGPGSEPATSGSETPGTSESATPESGPGSPAGSPTSTEEGSPAGSPTSTEEGTSTEPSEGSAPGTSESATPESGPGTSESATPESGPGTSESATPESGPGSEPATSGSETPGSEPATSGSETPGSPAGSPTSTEEGTSTEPSEGSAPGTSTEPSEGSAPGSEPATSGSETPGTSESATPESGPGTSTEPSEGAAEPEA

SEQ ID NO: 1004 - protein, 1743 aa, Artificial Sequence
  Description of Artificial Sequence: Synthetic polypeptide
HHHHHHSPAGSPTSTEEGTSESATPESGPGTSTEPSEGSAPGTSESATPESGPGSEPATSGSETPGTSESATPESGPGSEPATSGSETPGTSESATPESGPGTSTEPSEGSAPGSPAGSPTSTEEGTSESATPESGPGSEPATSGSETPGTSESATPESGPGSPAGSPTSTEEGSPAGSPTSTEEGTSTEPSEGSAPGTSESATPESGPGTSESATPESGPGTSESATPESGPGSEPATSGSETPGSEPATSGSETPGSPAGSPTSTEEGTSTEPSEGSAPGTSTEPSEGSAPGGSAPEAGRSANHTPAGLTGPATSGSETPGTDIQMTQSPSSLSASVGDRVTITCQASQDISNYLNWYQQKPGKAPKLLIYDASNLETGVPSRFSGSGSGTDFTFTISRLQPEDTATYFCQHFDHLPLAFGGGTKVEIKGATPPETGAETESPGETTGGSAESEPPGEGQVQLQESGPGAVKPSQTLSLTCTVSGGSVSSGDYYWTWIRQRPGKGLEWIGHIYYSGNTNYNPSLKSRLTISIDTSKTQFSLKLSSVTAADTATYYCVRDRVTGAFDIWGQGTAVTVSSGGGGSELVVTQEPSLTVSPGGTVTLTCRSSTGAVTTSNYANWVQQKPGQAPRGLIGGTNKRAPGTPARFSGSSLGGSAALTLSGVQPEDEAEYYCALWYSNLWVFGGGTKLTVLGATPPETGAETESPGETTGGSAESEPPGEGEVQLQESGGGLVQPGGSLKLSCAASGFTFNTYAMNWVRQAPGKGLEWVARIRSKYNNYATYYADSVKDRFTISRDDSKNTAYLQMNNLKTEDTAVYYCVRHGNFGNSYVSWFAYWGQGTLVTVSSGTAEAASASGEAGRSANHTPAGLTGPPGSPAGSPTSTEEGTSESATPESGPGTSTEPSEGSAPGSPAGSPTSTEEGTSTEPSEGSAPGTSTEPSEGSAPGTSESATPESGPGSEPATSGSETPGSEPATSGSETPGSPAGSPTSTEEGTSESATPESGPGTSTEPSEGSAPGTSTEPSEGSAPGSPAGSPTSTEEGTSTEPSEGSAPGTSTEPSEGSAPGTSESATPESGPGTSTEPSEGSAPGTSESATPESGPGSEPATSGSETPGTSTEPSEGSAPGTSTEPSEGSAPGTSESATPESGPGTSESATPESGPGSPAGSPTSTEEGTSESATPESGPGSEPATSGSETPGTSESATPESGPGTSTEPSEGSAPGTSTEPSEGSAPGTSTEPSEGSAPGTSTEPSEGSAPGTSTEPSEGSAPGTSTEPSEGSAPGSPAGSPTSTEEGTSTEPSEGSAPGTSESATPESGPGSEPATSGSETPGTSESATPESGPGSEPATSGSETPGTSESATPESGPGTSTEPSEGSAPGTSESATPESGPGSPAGSPTSTEEGSPAGSPTSTEEGSPAGSPTSTEEGTSESATPESGPGTSTEPSEGSAPGTSESATPESGPGSEPATSGSETPGTSESATPESGPGSEPATSGSETPGTSESATPESGPGTSTEPSEGSAPGSPAGSPTSTEEGTSESATPESGPGSEPATSGSETPGTSESATPESGPGSPAGSPTSTEEGSPAGSPTSTEEGTSTEPSEGSAPGTSESATPESGPGTSESATPESGPGTSESATPESGPGSEPATSGSETPGSEPATSGSETPGSPAGSPTSTEEGTSTEPSEGSAPGTSTEPSEGSAPGSEPATSGSETPGTSESATPESGPGTSTEPSEGAAEPEA

SEQ ID NO: 1005 - protein, 1743 aa, Artificial Sequence
  Description of Artificial Sequence: Synthetic polypeptide
HHHHHHSPAGSPTSTEEGTSESATPESGPGTSTEPSEGSAPGTSESATPESGPGSEPATSGSETPGTSESATPESGPGSEPATSGSETPGTSESATPESGPGTSTEPSEGSAPGSPAGSPTSTEEGTSESATPESGPGSEPATSGSETPGTSESATPESGPGSPAGSPTSTEEGSPAGSPTSTEEGTSTEPSEGSAPGTSESATPESGPGTSESATPESGPGTSESATPESGPGSEPATSGSETPGSEPATSGSETPGSPAGSPTSTEEGTSTEPSEGSAPGTSTEPSEGSAPGGSAPEAGRSANHTPAGLTGPATSGSETPGTDIQMTQSPSSLSASVGDRVTITCQASQDISNYLNWYQQKPGKAPKLLIYDASNLETGVPSRFSGSGSGTDFTFTISRLQPEDTATYFCQHFDHLPLAFGGGTKVEIKGATPPETGAETESPGETTGGSAESEPPGEGQVQLQESGPGAVKPSQTLSLTCTVSGGSVSSGDYYWTWIRQRPGKGLEWIGHIYYSGNTNYNPSLKSRLTISIDTSKTQFSLKLSSVTAADTATYYCVRDRVTGAFDIWGQGTTVTVSSGGGGSELVVTQEPSLTVSPGGTVTLTCRSSTGAVTTSNYANWVQQKPGQAPRGLIGGTNKRAPGTPARFSGSSLGGSAALTLSGVQPEDEAEYYCALWYSNLWVFGGGTKLTVLGATPPETGAETESPGETTGGSAESEPPGEGEVQLQESGGGLVQPGGSLKLSCAASGFTFNTYAMNWVRQAPGKGLEWVARIRSKYNNYATYYADSVKDRFTISRDDSKNTAYLQMNNLKTEDTAVYYCVRHGNFGNSYVSWFAYWGQGTLVTVSSGTAEAASASGEAGRSANHTPAGLTGPPGSPAGSPTSTEEGTSESATPESGPGTSTEPSEGSAPGSPAGSPTSTEEGTSTEPSEGSAPGTSTEPSEGSAPGTSESATPESGPGSEPATSGSETPGSEPATSGSETPGSPAGSPTSTEEGTSESATPESGPGTSTEPSEGSAPGTSTEPSEGSAPGSPAGSPTSTEEGTSTEPSEGSAPGTSTEPSEGSAPGTSESATPESGPGTSTEPSEGSAPGTSESATPESGPGSEPATSGSETPGTSTEPSEGSAPGTSTEPSEGSAPGTSESATPESGPGTSESATPESGPGSPAGSPTSTEEGTSESATPESGPGSEPATSGSETPGTSESATPESGPGTSTEPSEGSAPGTSTEPSEGSAPGTSTEPSEGSAPGTSTEPSEGSAPGTSTEPSEGSAPGTSTEPSEGSAPGSPAGSPTSTEEGTSTEPSEGSAPGTSESATPESGPGSEPATSGSETPGTSESATPESGPGSEPATSGSETPGTSESATPESGPGTSTEPSEGSAPGTSESATPESGPGSPAGSPTSTEEGSPAGSPTSTEEGSPAGSPTSTEEGTSESATPESGPGTSTEPSEGSAPGTSESATPESGPGSEPATSGSETPGTSESATPESGPGSEPATSGSETPGTSESATPESGPGTSTEPSEGSAPGSPAGSPTSTEEGTSESATPESGPGSEPATSGSETPGTSESATPESGPGSPAGSPTSTEEGSPAGSPTSTEEGTSTEPSEGSAPGTSESATPESGPGTSESATPESGPGTSESATPESGPGSEPATSGSETPGSEPATSGSETPGSPAGSPTSTEEGTSTEPSEGSAPGTSTEPSEGSAPGSEPATSGSETPGTSESATPESGPGTSTEPSEGAAEPEA

SEQ ID NO: 1006 - protein, 1420 aa, Artificial Sequence
  Description of Artificial Sequence: Synthetic polypeptide
DIQMTQSPSSLSASVGDRVTITCRSTKSLLHSNGITYLYWYQQKPGKAPKLLIYQMSNLASGVPSRFSSSGSGTDFTLTISSLQPEDFATYYCAQNLEIPRTFGQGTKVEIKGATPPETGAETESPGETTGGSAESEPPGEGQVQLVQSGPGLVQPGGSVRISCAASGYTFTNYGMNWVKQAPGKGLEWMGWINTYTGESTYADSFKGRFTFSLDTSASAAYLQINSLRAEDTAVYYCARFAIKGDYWGQGTLLTVSSGGGGSDIQMTQSPSSLSASVGDRVTITCRASQDIRNYLNWYQQKPGKAPKLLIYYTSRLESGVPSRFSGSGSGTDYTLTISSLQPEDFATYYCQQGNTLPWTFGQGTKVEIKGATPPETGAETESPGETTGGSAESEPPGEGEVQLVESGGGLVQPGGSLRLSCAASGYSFTGYTMNWVRQAPGKGLEWVALINPYKGVSTYNQKFKDRFTISVDKSKNTAYLQMNSLRAEDTAVYYCARSGYYGDSDWYFDVWGQGTLVTVSSGTAEAASASGLSGRSDNHSPLGLAGSPGSPAGSPTSTEEGTSESATPESGPGTSTEPSEGSAPGSPAGSPTSTEEGTSTEPSEGSAPGTSTEPSEGSAPGTSESATPESGPGSEPATSGSETPGSEPATSGSETPGSPAGSPTSTEEGTSESATPESGPGTSTEPSEGSAPGTSTEPSEGSAPGSPAGSPTSTEEGTSTEPSEGSAPGTSTEPSEGSAPGTSESATPESGPGTSTEPSEGSAPGTSESATPESGPGSEPATSGSETPGTSTEPSEGSAPGTSTEPSEGSAPGTSESATPESGPGTSESATPESGPGSPAGSPTSTEEGTSESATPESGPGSEPATSGSETPGTSESATPESGPGTSTEPSEGSAPGTSTEPSEGSAPGTSTEPSEGSAPGTSTEPSEGSAPGTSTEPSEGSAPGTSTEPSEGSAPGSPAGSPTSTEEGTSTEPSEGSAPGTSESATPESGPGSEPATSGSETPGTSESATPESGPGSEPATSGSETPGTSESATPESGPGTSTEPSEGSAPGTSESATPESGPGSPAGSPTSTEEGSPAGSPTSTEEGSPAGSPTSTEEGTSESATPESGPGTSTEPSEGSAPGTSESATPESGPGSEPATSGSETPGTSESATPESGPGSEPATSGSETPGTSESATPESGPGTSTEPSEGSAPGSPAGSPTSTEEGTSESATPESGPGSEPATSGSETPGTSESATPESGPGSPAGSPTSTEEGSPAGSPTSTEEGTSTEPSEGSAPGTSESATPESGPGTSESATPESGPGTSESATPESGPGSEPATSGSETPGSEPATSGSETPGSPAGSPTSTEEGTSTEPSEGSAPGTSTEPSEGSAPGSEPATSGSETPGTSESATPESGPGTSTEPSEGSAPGHHHHHH

SEQ ID NO: 1007 - protein, 1420 aa, Artificial Sequence; identical to SEQ ID NO: 1006
  Description of Artificial Sequence: Synthetic polypeptide

SEQ ID NO: 1008 - protein, 1420 aa, Artificial Sequence
  Description of Artificial Sequence: Synthetic polypeptide
DIQMTQSPSSLSASVGDRVTITCRSTKSLLHSNGITYLYWYQQKPGKAPKLLIYQMSNLASGVPSRFSSSGSGTDFTLTISSLQPEDFATYYCAQNLEIPRTFGQGTKVEIKGATPPETGAETESPGETTGGSAESEPPGEGQVQLVQSGPGLVQPGGSVRISCAASGYTFTNYGMNWVKQAPGKGLEWMGWINTYTGESTYADSFKGRFTFSLDTSASAAYLQINSLRAEDTAVYYCARFAIKGDYWGQGTLLTVSSGGGGSDIQMTQSPSSLSASVGDRVTITCRASQDIRNYLNWYQQKPGKAPKLLIYYTSRLESGVPSRFSGSGSGTDYTLTISSLQPEDFATYYCQQGNTLPWTFGQGTKVEIKGATPPETGAETESPGETTGGSAESEPPGEGEVQLVESGGGLVQPGGSLRLSCAASGYSFTGYTMNWVRQAPGKGLEWVALINPYKGVSTYNQKFKDRFTISVDKSKNTAYLQMNSLRAEDTAVYYCARSGYYGDSDWYFDVWGQGTLVTVSSGTAEAASASGESGRAANTAPEGLTGPPGSPAGSPTSTEEGTSESATPESGPGTSTEPSEGSAPGSPAGSPTSTEEGTSTEPSEGSAPGTSTEPSEGSAPGTSESATPESGPGSEPATSGSETPGSEPATSGSETPGSPAGSPTSTEEGTSESATPESGPGTSTEPSEGSAPGTSTEPSEGSAPGSPAGSPTSTEEGTSTEPSEGSAPGTSTEPSEGSAPGTSESATPESGPGTSTEPSEGSAPGTSESATPESGPGSEPATSGSETPGTSTEPSEGSAPGTSTEPSEGSAPGTSESATPESGPGTSESATPESGPGSPAGSPTSTEEGTSESATPESGPGSEPATSGSETPGTSESATPESGPGTSTEPSEGSAPGTSTEPSEGSAPGTSTEPSEGSAPGTSTEPSEGSAPGTSTEPSEGSAPGTSTEPSEGSAPGSPAGSPTSTEEGTSTEPSEGSAPGTSESATPESGPGSEPATSGSETPGTSESATPESGPGSEPATSGSETPGTSESATPESGPGTSTEPSEGSAPGTSESATPESGPGSPAGSPTSTEEGSPAGSPTSTEEGSPAGSPTSTEEGTSESATPESGPGTSTEPSEGSAPGTSESATPESGPGSEPATSGSETPGTSESATPESGPGSEPATSGSETPGTSESATPESGPGTSTEPSEGSAPGSPAGSPTSTEEGTSESATPESGPGSEPATSGSETPGTSESATPESGPGSPAGSPTSTEEGSPAGSPTSTEEGTSTEPSEGSAPGTSESATPESGPGTSESATPESGPGTSESATPESGPGSEPATSGSETPGSEPATSGSETPGSPAGSPTSTEEGTSTEPSEGSAPGTSTEPSEGSAPGSEPATSGSETPGTSESATPESGPGTSTEPSEGSAPGHHHHHH

SEQ ID NO: 1009 - protein, 1744 aa, Artificial Sequence
  Description of Artificial Sequence: Synthetic polypeptide
HHHHHHSPAGSPTSTEEGTSESATPESGPGTSTEPSEGSAPGTSESATPESGPGSEPATSGSETPGTSESATPESGPGSEPATSGSETPGTSESATPESGPGTSTEPSEGSAPGSPAGSPTSTEEGTSESATPESGPGSEPATSGSETPGTSESATPESGPGSPAGSPTSTEEGSPAGSPTSTEEGTSTEPSEGSAPGTSESATPESGPGTSESATPESGPGTSESATPESGPGSEPATSGSETPGSEPATSGSETPGSPAGSPTSTEEGTSTEPSEGSAPGTSTEPSEGSAPGGSAPEAGRSANHTPAGLTGPATSGSETPGTDIQMTQSPSSLSASVGDRVTITCRASQDVNTAVAWYQQKPGKAPKLLIYSASFLYSGVPSRFSGSRSGTDFTLTISSLQPEDFATYYCQQHYTTPPTFGQGTKVEIKGATPPETGAETESPGETTGGSAESEPPGEGEVQLVESGGGLVQPGGSLRLSCAASGFNIKDTYIHWVRQAPGKGLEWVARIYPTNGYTRYADSVKGRFTISADTSKNTAYLQMNSLRAEDTAVYYCSRWGGDGFYAMDYWGQGTLVTVSSGGGGSELVVTQEPSLTVSPGGTVTLTCRSSNGAVTSSNYANWVQQKPGQAPRGLIGGTNKRAPGTPARFSGSLLGGKAALTLSGVQPEDEAVYYCALWYPNLWVFGGGTKLTVLGATPPETGAETESPGETTGGSAESEPPGEGEVQLLESGGGIVQPGGSLKLSCAASGFTFNTYAMNWVRQAPGKGLEWVARIRSKYNNYATYYADSVKDRFTISRDDSKNTVYLQMNNLKTEDTAVYYCVRHENFGNSYVSWFAHWGQGTLVTVSSGTAEAASASGEAGRSANHTPAGLTGPPGSPAGSPTSTEEGTSESATPESGPGTSTEPSEGSAPGSPAGSPTSTEEGTSTEPSEGSAPGTSTEPSEGSAPGTSESATPESGPGSEPATSGSETPGSEPATSGSETPGSPAGSPTSTEEGTSESATPESGPGTSTEPSEGSAPGTSTEPSEGSAPGSPAGSPTSTEEGTSTEPSEGSAPGTSTEPSEGSAPGTSESATPESGPGTSTEPSEGSAPGTSESATPESGPGSEPATSGSETPGTSTEPSEGSAPGTSTEPSEGSAPGTSESATPESGPGTSESATPESGPGSPAGSPTSTEEGTSESATPESGPGSEPATSGSETPGTSESATPESGPGTSTEPSEGSAPGTSTEPSEGSAPGTSTEPSEGSAPGTSTEPSEGSAPGTSTEPSEGSAPGTSTEPSEGSAPGSPAGSPTSTEEGTSTEPSEGSAPGTSESATPESGPGSEPATSGSETPGTSESATPESGPGSEPATSGSETPGTSESATPESGPGTSTEPSEGSAPGTSESATPESGPGSPAGSPTSTEEGSPAGSPTSTEEGSPAGSPTSTEEGTSESATPESGPGTSTEPSEGSAPGTSESATPESGPGSEPATSGSETPGTSESATPESGPGSEPATSGSETPGTSESATPESGPGTSTEPSEGSAPGSPAGSPTSTEEGTSESATPESGPGSEPATSGSETPGTSESATPESGPGSPAGSPTSTEEGSPAGSPTSTEEGTSTEPSEGSAPGTSESATPESGPGTSESATPESGPGTSESATPESGPGSEPATSGSETPGSEPATSGSETPGSPAGSPTSTEEGTSTEPSEGSAPGTSTEPSEGSAPGSEPATSGSETPGTSESATPESGPGTSTEPSEGAAEPEA

SEQ ID NO: 1010 - protein, 1750 aa, Artificial Sequence
  Description of Artificial Sequence: Synthetic polypeptide
HHHHHHSPAGSPTSTEEGTSESATPESGPGTSTEPSEGSAPGTSESATPESGPGSEPATSGSETPGTSESATPESGPGSEPATSGSETPGTSESATPESGPGTSTEPSEGSAPGSPAGSPTSTEEGTSESATPESGPGSEPATSGSETPGTSESATPESGPGSPAGSPTSTEEGSPAGSPTSTEEGTSTEPSEGSAPGTSESATPESGPGTSESATPESGPGTSESATPESGPGSEPATSGSETPGSEPATSGSETPGSPAGSPTSTEEGTSTEPSEGSAPGTSTEPSEGSAPGGSAPTTGEAGEAAGATSAGATGPATSGSETPGTDIQMTQSPSSLSASVGDRVTITCRASQDVNTAVAWYQQKPGKAPKLLIYSASFLYSGVPSRFSGSRSGTDFTLTISSLQPEDFATYYCQQHYTTPPTFGQGTKVEIKGATPPETGAETESPGETTGGSAESEPPGEGEVQLVESGGGLVQPGGSLRLSCAASGFNIKDTYIHWVRQAPGKGLEWVARIYPTNGYTRYADSVKGRFTISADTSKNTAYLQMNSLRAEDTAVYYCSRWGGDGFYAMDYWGQGTLVTVSSGGGGSELVVTQEPSLTVSPGGTVTLTCRSSNGAVTSSNYANWVQQKPGQAPRGLIGGTNKRAPGTPARFSGSLLGGKAALTLSGVQPEDEAVYYCALWYPNLWVFGGGTKLTVLGATPPETGAETESPGETTGGSAESEPPGEGEVQLLESGGGIVQPGGSLKLSCAASGFTFNTYAMNWVRQAPGKGLEWVARIRSKYNNYATYYADSVKDRFTISRDDSKNTVYLQMNNLKTEDTAVYYCVRHENFGNSYVSWFAHWGQGTLVTVSSGTAEAASASGTTGEAGEAAGATSAGATGPPGSPAGSPTSTEEGTSESATPESGPGTSTEPSEGSAPGSPAGSPTSTEEGTSTEPSEGSAPGTSTEPSEGSAPGTSESATPESGPGSEPATSGSETPGSEPATSGSETPGSPAGSPTSTEEGTSESATPESGPGTSTEPSEGSAPGTSTEPSEGSAPGSPAGSPTSTEEGTSTEPSEGSAPGTSTEPSEGSAPGTSESATPESGPGTSTEPSEGSAPGTSESATPESGPGSEPATSGSETPGTSTEPSEGSAPGTSTEPSEGSAPGTSESATPESGPGTSESATPESGPGSPAGSPTSTEEGTSESATPESGPGSEPATSGSETPGTSESATPESGPGTSTEPSEGSAPGTSTEPSEGSAPGTSTEPSEGSAPGTSTEPSEGSAPGTSTEPSEGSAPGTSTEPSEGSAPGSPAGSPTSTEEGTSTEPSEGSAPGTSESATPESGPGSEPATSGSETPGTSESATPESGPGSEPATSGSETPGTSESATPESGPGTSTEPSEGSAPGTSESATPESGPGSPAGSPTSTEEGSPAGSPTSTEEGSPAGSPTSTEEGTSESATPESGPGTSTEPSEGSAPGTSESATPESGPGSEPATSGSETPGTSESATPESGPGSEPATSGSETPGTSESATPESGPGTSTEPSEGSAPGSPAGSPTSTEEGTSESATPESGPGSEPATSGSETPGTSESATPESGPGSPAGSPTSTEEGSPAGSPTSTEEGTSTEPSEGSAPGTSESATPESGPGTSESATPESGPGTSESATPESGPGSEPATSGSETPGSEPATSGSETPGSPAGSPTSTEEGTSTEPSEGSAPGTSTEPSEGSAPGSEPATSGSETPGTSESATPESGPGTSTEPSEGAAEPEA

SEQ ID NO: 1011 - protein, 1743 aa, Artificial Sequence
  Description of Artificial Sequence: Synthetic polypeptide
HHHHHHSPAGSPTSTEEGTSESATPESGPGTSTEPSEGSAPGTSESATPESGPGSEPATSGSETPGTSESATPESGPGSEPATSGSETPGTSESATPESGPGTSTEPSEGSAPGSPAGSPTSTEEGTSESATPESGPGSEPATSGSETPGTSESATPESGPGSPAGSPTSTEEGSPAGSPTSTEEGTSTEPSEGSAPGTSESATPESGPGTSESATPESGPGTSESATPESGPGSEPATSGSETPGSEPATSGSETPGSPAGSPTSTEEGTSTEPSEGSAPGTSTEPSEGSAPGGSAPEAGRSANHTPAGLTGPATSGSETPGTDIQMTQSPSSLSASVGDRVTITCQASQDISNYLNWYQQKPGKAPKLLIYDASNLETGVPSRFSGSGSGTDFTFTISSLQPEDIATYFCQHFDHLPLAFGGGTKVEIKGATPPETGAETESPGETTGGSAESEPPGEGQVQLQESGPGLVKPSETLSLTCTVSGGSVSSGDYYWTWIRQSPGKGLEWIGHIYYSGNTNYNPSLKSRLTISIDTSKTQFSLKLSSVTAADTAIYYCVRDRVTGAFDIWGQGTMVTVSSGGGGSELVVTQEPSLTVSPGGTVTLTCRSSTGAVTTSNYANWVQQKPGQAPRGLIGGTNKRAPGTPARFSGSSLGGSAALTLSGVQPEDEAEYYCALWYSNLWVFGGGTKLTVLGATPPETGAETESPGETTGGSAESEPPGEGEVQLQESGGGLVQPGGSLKLSCAASGFTFNTYAMNWVRQAPGKGLEWVARIRSKYNNYATYYADSVKDRFTISRDDSKNTAYLQMNNLKTEDTAVYYCVRHGNFGNSYVSWFAYWGQGTLVTVSSGTAEAASASGEAGRSANHTPAGLTGPPGSPAGSPTSTEEGTSESATPESGPGTSTEPSEGSAPGSPAGSPTSTEEGTSTEPSEGSAPGTSTEPSEGSAPGTSESATPESGPGSEPATSGSETPGSEPATSGSETPGSPAGSPTSTEEGTSESATPESGPGTSTEPSEGSAPGTSTEPSEGSAPGSPAGSPTSTEEGTSTEPSEGSAPGTSTEPSEGSAPGTSESATPESGPGTSTEPSEGSAPGTSESATPESGPGSEPATSGSETPGTSTEPSEGSAPGTSTEPSEGSAPGTSESATPESGPGTSESATPESGPGSPAGSPTSTEEGTSESATPESGPGSEPATSGSETPGTSESATPESGPGTSTEPSEGSAPGTSTEPSEGSAPGTSTEPSEGSAPGTSTEPSEGSAPGTSTEPSEGSAPGTSTEPSEGSAPGSPAGSPTSTEEGTSTEPSEGSAPGTSESATPESGPGSEPATSGSETPGTSESATPESGPGSEPATSGSETPGTSESATPESGPGTSTEPSEGSAPGTSESATPESGPGSPAGSPTSTEEGSPAGSPTSTEEGSPAGSPTSTEEGTSESATPESGPGTSTEPSEGSAPGTSESATPESGPGSEPATSGSETPGTSESATPESGPGSEPATSGSETPGTSESATPESGPGTSTEPSEGSAPGSPAGSPTSTEEGTSESATPESGPGSEPATSGSETPGTSESATPESGPGSPAGSPTSTEEGSPAGSPTSTEEGTSTEPSEGSAPGTSESATPESGPGTSESATPESGPGTSESATPESGPGSEPATSGSETPGSEPATSGSETPGSPAGSPTSTEEGTSTEPSEGSAPGTSTEPSEGSAPGSEPATSGSETPGTSESATPESGPGTSTEPSEGAAEPEA

SEQ ID NO: 1012 - protein, 1465 aa, Artificial Sequence
  Description of Artificial Sequence: Synthetic polypeptide
HHHHHHSPAGSPTSTEEGTSESATPESGPGTSTEPSEGSAPGTSESATPESGPGSEPATSGSETPGTSESATPESGPGSEPATSGSETPGTSESATPESGPGTSTEPSEGSAPGSPAGSPTSTEEGTSESATPESGPGSEPATSGSETPGTSESATPESGPGSPAGSPTSTEEGSPAGSPTSTEEGTSTEPSEGSAPGTSESATPESGPGTSESATPESGPGTSESATPESGPGSEPATSGSETPGSEPATSGSETPGSPAGSPTSTEEGTSTEPSEGSAPGTSTEPSEGSAPGGSAPTTGEAGEAAGATSAGATGPATSGSETPGTDIQMTQSPSSLSASVGDRVTITCKASQDVSIGVAWYQQKPGKAPKLLIYSASYRYTGVPSRFSGSGSGTDFTLTISSLQPEDFATYYCQQYYIYPYTFGQGTKVEIKGATPPETGAETESPGETTGGSAESEPPGEGEVQLVESGGGLVQPGGSLRLSCAASGFTFTDYTMDWVRQAPGKGLEWVADVNPNSGGSIYNQRFKGRFTLSVDRSKNTLYLQMNSLRAEDTAVYYCARNLGPSFYFDYWGQGTLVTVSSGGGGSELVVTQEPSLTVSPGGTVTLTCRSSNGAVTSSNYANWVQQKPGQAPRGLIGGTNKRAPGTPARFSGSLLGGKAALTLSGVQPEDEAVYYCALWYPNLWVFGGGTKLTVLGATPPETGAETESPGETTGGSAESEPPGEGEVQLLESGGGIVQPGGSLKLSCAASGFTFNTYAMNWVRQAPGKGLEWVARIRSKYNNYATYYADSVKDRFTISRDDSKNTVYLQMNNLKTEDTAVYYCVRHENFGNSYVSWFAHWGQGTLVTVSSGTAEAASASGTTGEAGEAAGATSAGATGPPGSPAGSPTSTEEGTSESATPESGPGTSTEPSEGSAPGSPAGSPTSTEEGTSTEPSEGSAPGTSTEPSEGSAPGTSESATPESGPGSEPATSGSETPGSEPATSGSETPGSPAGSPTSTEEGTSESATPESGPGTSTEPSEGSAPGTSTEPSEGSAPGSPAGSPTSTEEGTSTEPSEGSAPGTSTEPSEGSAPGTSESATPESGPGTSTEPSEGSAPGTSESATPESGPGSEPATSGSETPGTSTEPSEGSAPGTSTEPSEGSAPGTSESATPESGPGTSESATPESGPGSPAGSPTSTEEGTSESATPESGPGSEPATSGSETPGTSESATPESGPGTSTEPSEGSAPGTSTEPSEGSAPGTSTEPSEGSAPGTSTEPSEGSAPGTSTEPSEGSAPGTSTEPSEGSAPGSPAGSPTSTEEGTSTEPSEGSAPGTSESATPESGPGSEPATSGSETPGTSESATPESGPGSEPATSGSETPGTSESATPESGPGTSTEPSEGSAPGTSESATPESGPGSPAGSPTSTEEGSPAGSPTSTEEGSPAGSPTSTEEGTSESATPESGPGTSTEPSEGSAPGAAEPEA

SEQ ID NO: 1013 - protein, 1181 aa, Artificial Sequence
  Description of Artificial Sequence: Synthetic polypeptide
HHHHHHSPAGSPTSTEEGTSESATPESGPGTSTEPSEGSAPGTSESATPESGPGSEPATSGSETPGTSESATPESGPGSEPATSGSETPGTSESATPESGPGTSTEPSEGSAPGSPAGSPTSTEEGTSESATPESGPGSEPATSGSETPGTSESATPESGPGSPAGSPTSTEEGSPAGSPTSTEEGTSTEPSEGSAPGTSESATPESGPGTSESATPESGPGTSESATPESGPGSEPATSGSETPGSEPATSGSETPGSPAGSPTSTEEGTSTEPSEGSAPGTSTEPSEGSAPGGSAPTTGEAGEAAGATSAGATGPATSGSETPGTDIQMTQSPSSLSASVGDRVTITCKASQDVSIGVAWYQQKPGKAPKLLIYSASYRYTGVPSRFSGSGSGTDFTLTISSLQPEDFATYYCQQYYIYPYTFGQGTKVEIKGATPPETGAETESPGETTGGSAESEPPGEGEVQLVESGGGLVQPGGSLRLSCAASGFTFTDYTMDWVRQAPGKGLEWVADVNPNSGGSIYNQRFKGRFTLSVDRSKNTLYLQMNSLRAEDTAVYYCARNLGPSFYFDYWGQGTLVTVSSGGGGSELVVTQEPSLTVSPGGTVTLTCRSSNGAVTSSNYANWVQQKPGQAPRGLIGGTNKRAPGTPARFSGSLLGGKAALTLSGVQPEDEAVYYCALWYPNLWVFGGGTKLTVLGATPPETGAETESPGETTGGSAESEPPGEGEVQLLESGGGIVQPGGSLKLSCAASGFTFNTYAMNWVRQAPGKGLEWVARIRSKYNNYATYYADSVKDRFTISRDDSKNTVYLQMNNLKTEDTAVYYCVRHENFGNSYVSWFAHWGQGTLVTVSSGTAEAASASGTTGEAGEAAGATSAGATGPPGSPAGSPTSTEEGTSESATPESGPGTSTEPSEGSAPGSPAGSPTSTEEGTSTEPSEGSAPGTSTEPSEGSAPGTSESATPESGPGSEPATSGSETPGSEPATSGSETPGSPAGSPTSTEEGTSESATPESGPGTSTEPSEGSAPGTSTEPSEGSAPGSPAGSPTSTEEGTSTEPSEGSAPGTSTEPSEGSAPGTSESATPESGPGTSTEPSEGSAPGTSESATPESGPGSEPATSGSETPGTSTEPSEGSAPGTSTEPSEGSAPGTSESATPESGPGTSESATPESGPGSPAGAAEPEA

SEQ ID NO: 1014 - protein, 1743 aa, Artificial Sequence
  Description of Artificial Sequence: Synthetic polypeptide
HHHHHHSPAGSPTSTEEGTSESATPESGPGTSTEPSEGSAPGTSESATPESGPGSEPATSGSETPGTSESATPESGPGSEPATSGSETPGTSESATPESGPGTSTEPSEGSAPGSPAGSPTSTEEGTSESATPESGPGSEPATSGSETPGTSESATPESGPGSPAGSPTSTEEGSPAGSPTSTEEGTSTEPSEGSAPGTSESATPESGPGTSESATPESGPGTSESATPESGPGSEPATSGSETPGSEPATSGSETPGSPAGSPTSTEEGTSTEPSEGSAPGTSTEPSEGSAPGGSAPEAGRSANHTPAGLTGPATSGSETPGTDIQMTQSPSSLSASVGDRVTITCQASQDISNYLNWYQQKPGKAPKLLIYDASNLETGVPSRFSGSGSGTDFTFTISSLQPEDIATYFCQHFDHLPLAFGGGTKVEIKGATPPETGAETESPGETTGGSAESEPPGEGQVQLQESGPGLVKPSETLSLTCTVSGGSVSSGDYYWTWIRQSPGKGLEWIGHIYYSGNTNYNPSLKSRLTISIDTSKTQFSLKLSSVTAADTAIYYCVRDRVTGAFDIWGQGTMVTVSSGGGGSELVVTQEPSLTVSPGGTVTLTCRSSNGAVTSSNYANWVQQKPGQAPRGLIGGTNKRAPGTPARFSGSLLGGKAALTLSGVQPEDEAVYYCALWYPNLWVFGGGTKLTVLGATPPETGAETESPGETTGGSAESEPPGEGEVQLLESGGGIVQPGGSLKLSCAASGFTFNTYAMNWVRQAPGKGLEWVARIRSKYNNYATYYADSVKDRFTISRDDSKNTVYLQMNNLKTEDTAVYYCVRHENFGNSYVSWFAHWGQGTLVTVSSGTAEAASASGEAGRSANHTPAGLTGPPGSPAGSPTSTEEGTSESATPESGPGTSTEPSEGSAPGSPAGSPTSTEEGTSTEPSEGSAPGTSTEPSEGSAPGTSESATPESGPGSEPATSGSETPGSEPATSGSETPGSPAGSPTSTEEGTSESATPESGPGTSTEPSEGSAPGTSTEPSEGSAPGSPAGSPTSTEEGTSTEPSEGSAPGTSTEPSEGSAPGTSESATPESGPGTSTEPSEGSAPGTSESATPESGPGSEPATSGSETPGTSTEPSEGSAPGTSTEPSEGSAPGTSESATPESGPGTSESATPESGPGSPAGSPTSTEEGTSESATPESGPGSEPATSGSETPGTSESATPESGPGTSTEPSEGSAPGTSTEPSEGSAPGTSTEPSEGSAPGTSTEPSEGSAPGTSTEPSEGSAPGTSTEPSEGSAPGSPAGSPTSTEEGTSTEPSEGSAPGTSESATPESGPGSEPATSGSETPGTSESATPESGPGSEPATSGSETPGTSESATPESGPGTSTEPSEGSAPGTSESATPESGPGSPAGSPTSTEEGSPAGSPTSTEEGSPAGSPTSTEEGTSESATPESGPGTSTEPSEGSAPGTSESATPESGPGSEPATSGSETPGTSESATPESGPGSEPATSGSETPGTSESATPESGPGTSTEPSEGSAPGSPAGSPTSTEEGTSESATPESGPGSEPATSGSETPGTSESATPESGPGSPAGSPTSTEEGSPAGSPTSTEEGTSTEPSEGSAPGTSESATPESGPGTSESATPESGPGTSESATPESGPGSEPATSGSETPGSEPATSGSETPGSPAGSPTSTEEGTSTEPSEGSAPGTSTEPSEGSAPGSEPATSGSETPGTSESATPESGPGTSTEPSEGAAEPEA

SEQ ID NO: 1015 - protein, 1749 aa, Artificial Sequence
  Description of Artificial Sequence: Synthetic polypeptide
HHHHHHSPAGSPTSTEEGTSESATPESGPGTSTEPSEGSAPGTSESATPESGPGSEPATSGSETPGTSESATPESGPGSEPATSGSETPGTSESATPESGPGTSTEPSEGSAPGSPAGSPTSTEEGTSESATPESGPGSEPATSGSETPGTSESATPESGPGSPAGSPTSTEEGSPAGSPTSTEEGTSTEPSEGSAPGTSESATPESGPGTSESATPESGPGTSESATPESGPGSEPATSGSETPGSEPATSGSETPGSPAGSPTSTEEGTSTEPSEGSAPGTSTEPSEGSAPGGSAPTTGEAGEAAGATSAGATGPATSGSETPGTDIQMTQSPSSLSASVGDRVTITCQASQDISNYLNWYQQKPGKAPKLLIYDASNLETGVPSRFSGSGSGTDFTFTISSLQPEDIATYFCQHFDHLPLAFGGGTKVEIKGATPPETGAETESPGETTGGSAESEPPGEGQVQLQESGPGLVKPSETLSLTCTVSGGSVSSGDYYWTWIRQSPGKGLEWIGHIYYSGNTNYNPSLKSRLTISIDTSKTQFSLKLSSVTAADTAIYYCVRDRVTGAFDIWGQGTMVTVSSGGGGSELVVTQEPSLTVSPGGTVTLTCRSSTGAVTTSNYANWVQQKPGQAPRGLIGGTNKRAPGTPARFSGSLLGGKAALTLSGVQPEDEAEYYCALWYSNLWVFGGGTKLTVLGATPPETGAETESPGETTGGSAESEPPGEGEVQLLESGGGLVQPGGSLKLSCAASGFTFNTYAMNWVRQAPGKGLEWVARIRSKYNNYATYYADSVKDRFTISRDDSKNTAYLQMNNLKTEDTAVYYCVRHGNFGNSYVSWFAYWGQGTLVTVSSGTAEAASASGTTGEAGEAAGATSAGATGPPGSPAGSPTSTEEGTSESATPESGPGTSTEPSEGSAPGSPAGSPTSTEEGTSTEPSEGSAPGTSTEPSEGSAPGTSESATPESGPGSEPATSGSETPGSEPATSGSETPGSPAGSPTSTEEGTSESATPESGPGTSTEPSEGSAPGTSTEPSEGSAPGSPAGSPTSTEEGTSTEPSEGSAPGTSTEPSEGSAPGTSESATPESGPGTSTEPSEGSAPGTSESATPESGPGSEPATSGSETPGTSTEPSEGSAPGTSTEPSEGSAPGTSESATPESGPGTSESATPESGPGSPAGSPTSTEEGTSESATPESGPGSEPATSGSETPGTSESATPESGPGTSTEPSEGSAPGTSTEPSEGSAPGTSTEPSEGSAPGTSTEPSEGSAPGTSTEPSEGSAPGTSTEPSEGSAPGSPAGSPTSTEEGTSTEPSEGSAPGTSESATPESGPGSEPATSGSETPGTSESATPESGPGSEPATSGSETPGTSESATPESGPGTSTEPSEGSAPGTSESATPESGPGSPAGSPTSTEEGSPAGSPTSTEEGSPAGSPTSTEEGTSESATPESGPGTSTEPSEGSAPGTSESATPESGPGSEPATSGSETPGTSESATPESGPGSEPATSGSETPGTSESATPESGPGTSTEPSEGSAPGSPAGSPTSTEEGTSESATPESGPGSEPATSGSETPGTSESATPESGPGSPAGSPTSTEEGSPAGSPTSTEEGTSTEPSEGSAPGTSESATPESGPGTSESATPESGPGTSESATPESGPGSEPATSGSETPGSEPATSGSETPGSPAGSPTSTEEGTSTEPSEGSAPGTSTEPSEGSAPGSEPATSGSETPGTSESATPESGPGTSTEPSEGAAEPEA

SEQ ID NO: 1016 - protein, 1423 aa, Artificial Sequence
  Description of Artificial Sequence: Synthetic polypeptide
DIQMTQSPSSLSASVGDRVTITCKASQDVSIGVAWYQQKPGKAPKLLIYSASYRYTGVPSRFSGSGSGTDFTLTISSLQPEDFATYYCQQYYIYPYTFGQGTKVEIKGATPPETGAETESPGETTGGSAESEPPGEGEVQLVESGGGLVQPGGSLRLSCAASGFTFTDYTMDWVRQAPGKGLEWVADVNPNSGGSIYNQRFKGRFTLSVDRSKNTLYLQMNSLRAEDTAVYYCARNLGPSFYFDYWGQGTLVTVSSGGGGSELVVTQEPSLTVSPGGTVTLTCRSSTGAVTTSNYANWVQQKPGQAPRGLIGGTNKRAPGTPARFSGSLLGGKAALTLSGVQPEDEAEYYCALWYSNLWVFGGGTKLTVLGATPPETGAETESPGETTGGSAESEPPGEGEVQLLESGGGLVQPGGSLKLSCAASGFTFNTYAMNWVRQAPGKGLEWVARIRSKYNNYATYYADSVKDRFTISRDDSKNTAYLQMNNLKTEDTAVYYCVRHGNFGNSYVSWFAYWGQGTLVTVSSGTAEAASASGLSGRSDNHSPLGLAGSPGSPAGSPTSTEEGTSESATPESGPGTSTEPSEGSAPGSPAGSPTSTEEGTSTEPSEGSAPGTSTEPSEGSAPGTSESATPESGPGSEPATSGSETPGSEPATSGSETPGSPAGSPTSTEEGTSESATPESGPGTSTEPSEGSAPGTSTEPSEGSAPGSPAGSPTSTEEGTSTEPSEGSAPGTSTEPSEGSAPGTSESATPESGPGTSTEPSEGSAPGTSESATPESGPGSEPATSGSETPGTSTEPSEGSAPGTSTEPSEGSAPGTSESATPESGPGTSESATPESGPGSPAGSPTSTEEGTSESATPESGPGSEPATSGSETPGTSESATPESGPGTSTEPSEGSAPGTSTEPSEGSAPGTSTEPSEGSAPGTSTEPSEGSAPGTSTEPSEGSAPGTSTEPSEGSAPGSPAGSPTSTEEGTSTEPSEGSAPGTSESATPESGPGSEPATSGSETPGTSESATPESGPGSEPATSGSETPGTSESATPESGPGTSTEPSEGSAPGTSESATPESGPGSPAGSPTSTEEGSPAGSPTSTEEGSPAGSPTSTEEGTSESATPESGPGTSTEPSEGSAPGTSESATPESGPGSEPATSGSETPGTSESATPESGPGSEPATSGSETPGTSESATPESGPGTSTEPSEGSAPGSPAGSPTSTEEGTSESATPESGPGSEPATSGSETPGTSESATPESGPGSPAGSPTSTEEGSPAGSPTSTEEGTSTEPSEGSAPGTSESATPESGPGTSESATPESGPGTSESATPESGPGSEPATSGSETPGSEPATSGSETPGSPAGSPTSTEEGTSTEPSEGSAPGTSTEPSEGSAPGSEPATSGSETPGTSESATPESGPGTSTEPSEGSAPGHHHHHH

SEQ ID NO: 1017 - protein, 1743 aa, Artificial Sequence
  Description of Artificial Sequence: Synthetic polypeptide
HHHHHHSPAGSPTSTEEGTSESATPESGPGTSTEPSEGSAPGTSESATPESGPGSEPATSGSETPGTSESATPESGPGSEPATSGSETPGTSESATPESGPGTSTEPSEGSAPGSPAGSPTSTEEGTSESATPESGPGSEPATSGSETPGTSESATPESGPGSPAGSPTSTEEGSPAGSPTSTEEGTSTEPSEGSAPGTSESATPESGPGTSESATPESGPGTSESATPESGPGSEPATSGSETPGSEPATSGSETPGSPAGSPTSTEEGTSTEPSEGSAPGTSTEPSEGSAPGGSAPEAGRSANHTPAGLTGPATSGSETPGTDIQMTQSPSSLSASVGDRVTITCQASQDISNYLNWYQQKPGKAPKLLIYDASNLETGVPSRFSGSGSGTDFTFTISSLQPEDIATYFCQHFDHLPLAFGGGTKVEIKGATPPETGAETESPGETTGGSAESEPPGEGQVQLQESGPGLVKPSETLSLTCTVSGGSVSSGDYYWTWIRQSPGKGLEWIGHIYYSGNTNYNPSLKSRLTISIDTSKTQFSLKLSSVTAADTAIYYCVRDRVTGAFDIWGQGTMVTVSSGGGGSELVVTQEPSLTVSPGGTVTLTCRSSNGEVTTSNYANWVQQKPGQAPRGLIGGTIKRAPGTPARFSGSLLGGKAALTLSGVQPEDEAVYYCALWYPNLWVFGGGTKLTVLGATPPETGAETESPGETTGGSAESEPPGEGEVQLLESGGGIVQPGGSLKLSCAASGFTFNTYAMNWVRQAPGKGLEWVARIRSKYNNYATYYADSVKDRFTISRDDSKNTVYLQMNNLKTEDTAVYYCVRHENFGNSYVSWFAHWGQGTLVTVSSGTAEAASASGEAGRSANHTPAGLTGPPGSPAGSPTSTEEGTSESATPESGPGTSTEPSEGSAPGSPAGSPTSTEEGTSTEPSEGSAPGTSTEPSEGSAPGTSESATPESGPGSEPATSGSETPGSEPATSGSETPGSPAGSPTSTEEGTSESATPESGPGTSTEPSEGSAPGTSTEPSEGSAPGSPAGSPTSTEEGTSTEPSEGSAPGTSTEPSEGSAPGTSESATPESGPGTSTEPSEGSAPGTSESATPESGPGSEPATSGSETPGTSTEPSEGSAPGTSTEPSEGSAPGTSESATPESGPGTSESATPESGPGSPAGSPTSTEEGTSESATPESGPGSEPATSGSETPGTSESATPESGPGTSTEPSEGSAPGTSTEPSEGSAPGTSTEPSEGSAPGTSTEPSEGSAPGTSTEPSEGSAPGTSTEPSEGSAPGSPAGSPTSTEEGTSTEPSEGSAPGTSESATPESGPGSEPATSGSETPGTSESATPESGPGSEPATSGSETPGTSESATPESGPGTSTEPSEGSAPGTSESATPESGPGSPAGSPTSTEEGSPAGSPTSTEEGSPAGSPTSTEEGTSESATPESGPGTSTEPSEGSAPGTSESATPESGPGSEPATSGSETPGTSESATPESGPGSEPATSGSETPGTSESATPESGPGTSTEPSEGSAPGSPAGSPTSTEEGTSESATPESGPGSEPATSGSETPGTSESATPESGPGSPAGSPTSTEEGSPAGSPTSTEEGTSTEPSEGSAPGTSESATPESGPGTSESATPESGPGTSESATPESGPGSEPATSGSETPGSEPATSGSETPGSPAGSPTSTEEGTSTEPSEGSAPGTSTEPSEGSAPGSEPATSGSETPGTSESATPESGPGTSTEPSEGAAEPEA

SEQ ID NO: 1018 - protein, 1743 aa, Artificial Sequence
  Description of Artificial Sequence: Synthetic polypeptide
HHHHHHSPAGSPTSTEEGTSESATPESGPGTSTEPSEGSAPGTSESATPESGPGSEPATSGSETPGTSESATPESGPGSEPATSGSETPGTSESATPESGPGTSTEPSEGSAPGSPAGSPTSTEEGTSESATPESGPGSEPATSGSETPGTSESATPESGPGSPAGSPTSTEEGSPAGSPTSTEEGTSTEPSEGSAPGTSESATPESGPGTSESATPESGPGTSESATPESGPGSEPATSGSETPGSEPATSGSETPGSPAGSPTSTEEGTSTEPSEGSAPGTSTEPSEGSAPGGSAPEAGRSANHTPAGLTGPATSGSETPGTDIQMTQSPSSLSASVGDRVTITCQASQDISNYLNWYQQKPGKAPKLLIYDASNLETGVPSRFSGSGSGTDFTFTISSLQPEDIATYFCQHFDHLPLAFGGGTKVEIKGATPPETGAETESPGETTGGSAESEPPGEGQVQLQESGPGLVKPSETLSLTCTVSGGSVSSGDYYWTWIRQSPGKGLEWIGHIYYSGNTNYNPSLKSRLTISIDTSKTQFSLKLSSVTAADTAIYYCVRDRVTGAFDIWGQGTMVTVSSGGGGSELVVTQEPSHTVSPGGTVTLTCRSSTGAVTSSNYANWVQQKPGQAPRGLIGGTIKRAPGTPARFSGSLLGGKAALTLSGVQPEDEAEYYCALWYPNLWVFGGGTKLTVLGATPPETGAETESPGETTGGSAESEPPGEGEVQLLESGGGIVQPGGSLKLSCAASGFTFNTYAMNWVRQAPGKGLEWVARIRSKYNNYATYYADSVKDRFTISRDDSKNTVYLQMNNLKTEDTAVYYCVRHENFGNSYVSWFAHWGQGTLVTVSSGTAEAASASGEAGRSANHTPAGLTGPPGSPAGSPTSTEEGTSESATPESGPGTSTEPSEGSAPGSPAGSPTSTEEGTSTEPSEGSAPGTSTEPSEGSAPGTSESATPESGPGSEPATSGSETPGSEPATSGSETPGSPAGSPTSTEEGTSESATPESGPGTSTEPSEGSAPGTSTEPSEGSAPGSPAGSPTSTEEGTSTEPSEGSAPGTSTEPSEGSAPGTSESATPESGPGTSTEPSEGSAPGTSESATPESGPGSEPATSGSETPGTSTEPSEGSAPGTSTEPSEGSAPGTSESATPESGPGTSESATPESGPGSPAGSPTSTEEGTSESATPESGPGSEPATSGSETPGTSESATPESGPGTSTEPSEGSAPGTSTEPSEGSAPGTSTEPSEGSAPGTSTEPSEGSAPGTSTEPSEGSAPGTSTEPSEGSAPGSPAGSPTSTEEGTSTEPSEGSAPGTSESATPESGPGSEPATSGSETPGTSESATPESGPGSEPATSGSETPGTSESATPESGPGTSTEPSEGSAPGTSESATPESGPGSPAGSPTSTEEGSPAGSPTSTEEGSPAGSPTSTEEGTSESATPESGPGTSTEPSEGSAPGTSESATPESGPGSEPATSGSETPGTSESATPESGPGSEPATSGSETPGTSESATPESGPGTSTEPSEGSAPGSPAGSPTSTEEGTSESATPESGPGSEPATSGSETPGTSESATPESGPGSPAGSPTSTEEGSPAGSPTSTEEGTSTEPSEGSAPGTSESATPESGPGTSESATPESGPGTSESATPESGPGSEPATSGSETPGSEPATSGSETPGSPAGSPTSTEEGTSTEPSEGSAPGTSTEPSEGSAPGSEPATSGSETPGTSESATPESGPGTSTEPSEGAAEPEA

SEQ ID NO: 1019 - protein, 1743 aa, Artificial Sequence
  Description of Artificial Sequence: Synthetic polypeptide
HHHHHHSPAGSPTSTEEGTSESATPESGPGTSTEPSEGSAPGTSESATPESGPGSEPATSGSETPGTSESATPESGPGSEPATSGSETPGTSESATPESGPGTSTEPSEGSAPGSPAGSPTSTEEGTSESATPESGPGSEPATSGSETPGTSESATPESGPGSPAGSPTSTEEGSPAGSPTSTEEGTSTEPSEGSAPGTSESATPESGPGTSESATPESGPGTSESATPESGPGSEPATSGSETPGSEPATSGSETPGSPAGSPTSTEEGTSTEPSEGSAPGTSTEPSEGSAPGGSAPEAGRSANHTPAGLTGPATSGSETPGTDIQMTQSPSSLSASVGDRVTITCQASQDISNYLNWYQQKPGKAPKLLIYDASNLETGVPSRFSGSGSGTDFTFTISSLQPEDIATYFCQHFDHLPLAFGGGTKVEIKGATPPETGAETESPGETTGGSAESEPPGEGQVQLQESGPGLVKPSETLSLTCTVSGGSVSSGDYYWTWIRQSPGKGLEWIGHIYYSGNTNYNPSLKSRLTISIDTSKTQFSLKLSSVTAADTAIYYCVRDRVTGAFDIWGQGTMVTVSSGGGGSELVVTQEPSHTVSPGGTVTLTCRSSTGEVTTSNYANWVQQKPGQAPRGLIGGTIKRAPGTPARFSGSLLGGKAALTLSGVQPEDEAEYYCALWYPNLWVFGGGTKLTVLGATPPETGAETESPGETTGGSAESEPPGEGEVQLLESGGGIVQPGGSLKLSCAASGFTFNTYAMNWVRQAPGKGLEWVARIRSKYNNYATYYADSVKDRFTISRDDSKNTVYLQMNNLKTEDTAVYYCVRHENFGNSYVSWFAHWGQGTLVTVSSGTAEAASASGEAGRSANHTPAGLTGPPGSPAGSPTSTEEGTSESATPESGPGTSTEPSEGSAPGSPAGSPTSTEEGTSTEPSEGSAPGTSTEPSEGSAPGTSESATPESGPGSEPATSGSETPGSEPATSGSETPGSPAGSPTSTEEGTSESATPESGPGTSTEPSEGSAPGTSTEPSEGSAPGSPAGSPTSTEEGTSTEPSEGSAPGTSTEPSEGSAPGTSESATPESGPGTSTEPSEGSAPGTSESATPESGPGSEPATSGSETPGTSTEPSEGSAPGTSTEPSEGSAPGTSESATPESGPGTSESATPESGPGSPAGSPTSTEEGTSESATPESGPGSEPATSGSETPGTSESATPESGPGTSTEPSEGSAPGTSTEPSEGSAPGTSTEPSEGSAPGTSTEPSEGSAPGTSTEPSEGSAPGTSTEPSEGSAPGSPAGSPTSTEEGTSTEPSEGSAPGTSESATPESGPGSEPATSGSETPGTSESATPESGPGSEPATSGSETPGTSESATPESGPGTSTEPSEGSAPGTSESATPESGPGSPAGSPTSTEEGSPAGSPTSTEEGSPAGSPTSTEEGTSESATPESGPGTSTEPSEGSAPGTSESATPESGPGSEPATSGSETPGTSESATPESGPGSEPATSGSETPGTSESATPESGPGTSTEPSEGSAPGSPAGSPTSTEEGTSESATPESGPGSEPATSGSETPGTSESATPESGPGSPAGSPTSTEEGSPAGSPTSTEEGTSTEPSEGSAPGTSESATPESGPGTSESATPESGPGTSESATPESGPGSEPATSGSETPGSEPATSGSETPGSPAGSPTSTEEGTSTEPSEGSAPGTSTEPSEGSAPGSEPATSGSETPGTSESATPESGPGTSTEPSEGAAEPEA

SEQ ID NO: 1020 - protein, 1743 aa, Artificial Sequence
  Description of Artificial Sequence: Synthetic polypeptide
HHHHHHSPAGSPTSTEEGTSESATPESGPGTSTEPSEGSAPGTSESATPESGPGSEPATSGSETPGTSESATPESGPGSEPATSGSETPGTSESATPESGPGTSTEPSEGSAPGSPAGSPTSTEEGTSESATPESGPGSEPATSGSETPGTSESATPESGPGSPAGSPTSTEEGSPAGSPTSTEEGTSTEPSEGSAPGTSESATPESGPGTSESATPESGPGTSESATPESGPGSEPATSGSETPGSEPATSGSETPGSPAGSPTSTEEGTSTEPSEGSAPGTSTEPSEGSAPGGSAPEAGRSANHTPAGLTGPATSGSETPGTDIQMTQSPSSLSASVGDRVTITCQASQDISNYLNWYQQKPGKAPKLLIYDASNLETGVPSRFSGSGSGTDFTFTISSLQPEDIATYFCQHFDHLPLAFGGGTKVEIKGATPPETGAETESPGETTGGSAESEPPGEGQVQLQESGPGLVKPSETLSLTCTVSGGSVSSGDYYWTWIRQSPGKGLEWIGHIYYSGNTNYNPSLKSRLTISIDTSKTQFSLKLSSVTAADTAIYYCVRDRVTGAFDIWGQGTMVTVSSGGGGSELVVTQEPSLTVSPGGTVTLTCRSSNGAVTSSNYANWVQQKPGQAPRGLIGGTNKRAPGTPARFSGSSLGGKAALTLSGVQPEDEAVYYCALWYPNLWVFGGGTKLTVLGATPPETGAETESPGETTGGSAESEPPGEGEVQLQESGGGIVQPGGSLKLSCAASGFTFNTYAMNWVRQAPGKGLEWVARIRSKYNNYATYYADSVKDRFTISRDDSKNTVYLQMNNLKTEDTAVYYCVRHENFGNSYVSWFAHWGQGTLVTVSSGTAEAASASGEAGRSANHTPAGLTGPPGSPAGSPTSTEEGTSESATPESGPGTSTEPSEGSAPGSPAGSPTSTEEGTSTEPSEGSAPGTSTEPSEGSAPGTSESATPESGPGSEPATSGSETPGSEPATSGSETPGSPAGSPTSTEEGTSESATPESGPGTSTEPSEGSAPGTSTEPSEGSAPGSPAGSPTSTEEGTSTEPSEGSAPGTSTEPSEGSAPGTSESATPESGPGTSTEPSEGSAPGTSESATPESGPGSEPATSGSETPGTSTEPSEGSAPGTSTEPSEGSAPGTSESATPESGPGTSESATPESGPGSPAGSPTSTEEGTSESATPESGPGSEPATSGSETPGTSESATPESGPGTSTEPSEGSAPGTSTEPSEGSAPGTSTEPSEGSAPGTSTEPSEGSAPGTSTEPSEGSAPGTSTEPSEGSAPGSPAGSPTSTEEGTSTEPSEGSAPGTSESATPESGPGSEPATSGSETPGTSESATPESGPGSEPATSGSETPGTSESATPESGPGTSTEPSEGSAPGTSESATPESGPGSPAGSPTSTEEGSPAGSPTSTEEGSPAGSPTSTEEGTSESATPESGPGTSTEPSEGSAPGTSESATPESGPGSEPATSGSETPGTSESATPESGPGSEPATSGSETPGTSESATPESGPGTSTEPSEGSAPGSPAGSPTSTEEGTSESATPESGPGSEPATSGSETPGTSESATPESGPGSPAGSPTSTEEGSPAGSPTSTEEGTSTEPSEGSAPGTSESATPESGPGTSESATPESGPGTSESATPESGPGSEPATSGSETPGSEPATSGSETPGSPAGSPTSTEEGTSTEPSEGSAPGTSTEPSEGSAPGSEPATSGSETPGTSESATPESGPGTSTEPSEGAAEPEA

SEQ ID NO: 1021 - protein, 1743 aa, Artificial Sequence
  Description of Artificial Sequence: Synthetic polypeptide
HHHHHHSPAGSPTSTEEGTSESATPESGPGTSTEPSEGSAPGTSESATPESGPGSEPATSGSETPGTSESATPESGPGSEPATSGSETPGTSESATPESGPGTSTEPSEGSAPGSPAGSPTSTEEGTSESATPESGPGSEPATSGSETPGTSESATPESGPGSPAGSPTSTEEGSPAGSPTSTEEGTSTEPSEGSAPGTSESATPESGPGTSESATPESGPGTSESATPESGPGSEPATSGSETPGSEPATSGSETPGSPAGSPTSTEEGTSTEPSEGSAPGTSTEPSEGSAPGGSAPEAGRSANHTPAGLTGPATSGSETPGTDIQMTQSPSSLSASVGDRVTITCQASQDISNYLNWYQQKPGKAPKLLIYDASNLETGVPSRFSGSGSGTDFTFTISSLQPEDIATYFCQHFDHLPLAFGGGTKVEIKGATPPETGAETESPGETTGGSAESEPPGEGQVQLQESGPGLVKPSETLSLTCTVSGGSVSSGDYYWTWIRQSPGKGLEWIGHIYYSGNTNYNPSLKSRLTISIDTSKTQFSLKLSSVTAADTAIYYCVRDRVTGAFDIWGQGTMVTVSSGGGGSELVVTQEPSLTVSPGGTVTLTCRSSNGAVTSSNYANWVQQKPGQAPRGLIGGTNKRAPGTPARFSGSLLGGSAALTLSGVQPEDEAVYYCALWYPNLWVFGGGTKLTVLGATPPETGAETESPGETTGGSAESEPPGEGEVQLQESGGGIVQPGGSLKLSCAASGFTFNTYAMNWVRQAPGKGLEWVARIRSKYNNYATYYADSVKDRFTISRDDSKNTVYLQMNNLKTEDTAVYYCVRHENFGNSYVSWFAHWGQGTLVTVSSGTAEAASASGEAGRSANHTPAGLTGPPGSPAGSPTSTEEGTSESATPESGPGTSTEPSEGSAPGSPAGSPTSTEEGTSTEPSEGSAPGTSTEPSEGSAPGTSESATPESGPGSEPATSGSETPGSEPATSGSETPGSPAGSPTSTEEGTSESATPESGPGTSTEPSEGSAPGTSTEPSEGSAPGSPAGSPTSTEEGTSTEPSEGSAPGTSTEPSEGSAPGTSESATPESGPGTSTEPSEGSAPGTSESATPESGPGSEPATSGSETPGTSTEPSEGSAPGTSTEPSEGSAPGTSESATPESGPGTSESATPESGPGSPAGSPTSTEEGTSESATPESGPGSEPATSGSETPGTSESATPESGPGTSTEPSEGSAPGTSTEPSEGSAPGTSTEPSEGSAPGTSTEPSEGSAPGTSTEPSEGSAPGTSTEPSEGSAPGSPAGSPTSTEEGTSTEPSEGSAPGTSESATPESGPGSEPATSGSETPGTSESATPESGPGSEPATSGSETPGTSESATPESGPGTSTEPSEGSAPGTSESATPESGPGSPAGSPTSTEEGSPAGSPTSTEEGSPAGSPTSTEEGTSESATPESGPGTSTEPSEGSAPGTSESATPESGPGSEPATSGSETPGTSESATPESGPGSEPATSGSETPGTSESATPESGPGTSTEPSEGSAPGSPAGSPTSTEEGTSESATPESGPGSEPATSGSETPGTSESATPESGPGSPAGSPTSTEEGSPAGSPTSTEEGTSTEPSEGSAPGTSESATPESGPGTSESATPESGPGTSESATPESGPGSEPATSGSETPGSEPATSGSETPGSPAGSPTSTEEGTSTEPSEGSAPGTSTEPSEGSAPGSEPATSGSETPGTSESATPESGPGTSTEPSEGAAEPEA

SEQ ID NO: 1022 - protein, 1743 aa, Artificial Sequence
  Description of Artificial Sequence: Synthetic polypeptide
HHHHHHSPAGSPTSTEEGTSESATPESGPGTSTEPSEGSAPGTSESATPESGPGSEPATSGSETPGTSESATPESGPGSEPATSGSETPGTSESATPESGPGTSTEPSEGSAPGSPAGSPTSTEEGTSESATPESGPGSEPATSGSETPGTSESATPESGPGSPAGSPTSTEEGSPAGSPTSTEEGTSTEPSEGSAPGTSESATPESGPGTSESATPESGPGTSESATPESGPGSEPATSGSETPGSEPATSGSETPGSPAGSPTSTEEGTSTEPSEGSAPGTSTEPSEGSAPGGSAPEAGRSANHTPAGLTGPATSGSETPGTDIQMTQSPSSLSASVGDRVTITCQASQDISNYLNWYQQKPGKAPKLLIYDASNLETGVPSRFSGSGSGTDFTFTISRLQPEDTATYFCQHFDHLPLAFGGGTKVEIKGATPPETGAETESPGETTGGSAESEPPGEGQVQLQESGPGAVKPSETLSLTCTVSGGSVSSGDYYWTWIRQSPGKGLEWIGHIYYSGNTNYNPSLKSRLTISIDTSKTQFSLKLSSVTAADTATYYCVRDRVTGAFDIWGQGTAVTVSSGGGGSELVVTQEPSLTVSPGGTVTLTCRSSNGAVTSSNYANWVQQKPGQAPRGLIGGTNKRAPGTPARFSGSLLGGKAALTLSGVQPEDEAVYYCALWYPNLWVFGGGTKLTVLGATPPETGAETESPGETTGGSAESEPPGEGEVQLLESGGGIVQPGGSLKLSCAASGFTFNTYAMNWVRQAPGKGLEWVARIRSKYNNYATYYADSVKDRFTISRDDSKNTVYLQMNNLKTEDTAVYYCVRHENFGNSYVSWFAHWGQGTLVTVSSGTAEAASASGEAGRSANHTPAGLTGPPGSPAGSPTSTEEGTSESATPESGPGTSTEPSEGSAPGSPAGSPTSTEEGTSTEPSEGSAPGTSTEPSEGSAPGTSESATPESGPGSEPATSGSETPGSEPATSGSETPGSPAGSPTSTEEGTSESATPESGPGTSTEPSEGSAPGTSTEPSEGSAPGSPAGSPTSTEEGTSTEPSEGSAPGTSTEPSEGSAPGTSESATPESGPGTSTEPSEGSAPGTSESATPESGPGSEPATSGSETPGTSTEPSEGSAPGTSTEPSEGSAPGTSESATPESGPGTSESATPESGPGSPAGSPTSTEEGTSESATPESGPGSEPATSGSETPGTSESATPESGPGTSTEPSEGSAPGTSTEPSEGSAPGTSTEPSEGSAPGTSTEPSEGSAPGTSTEPSEGSAPGTSTEPSEGSAPGSPAGSPTSTEEGTSTEPSEGSAPGTSESATPESGPGSEPATSGSETPGTSESATPESGPGSEPATSGSETPGTSESATPESGPGTSTEPSEGSAPGTSESATPESGPGSPAGSPTSTEEGSPAGSPTSTEEGSPAGSPTSTEEGTSESATPESGPGTSTEPSEGSAPGTSESATPESGPGSEPATSGSETPGTSESATPESGPGSEPATSGSETPGTSESATPESGPGTSTEPSEGSAPGSPAGSPTSTEEGTSESATPESGPGSEPATSGSETPGTSESATPESGPGSPAGSPTSTEEGSPAGSPTSTEEGTSTEPSEGSAPGTSESATPESGPGTSESATPESGPGTSESATPESGPGSEPATSGSETPGSEPATSGSETPGSPAGSPTSTEEGTSTEPSEGSAPGTSTEPSEGSAPGSEPATSGSETPGTSESATPESGPGTSTEPSEGAAEPEA

SEQ ID NO: 1023 - protein, 1743 aa, Artificial Sequence
  Description of Artificial Sequence: Synthetic polypeptide
HHHHHHSPAGSPTSTEEGTSESATPESGPGTSTEPSEGSAPGTSESATPESGPGSEPATSGSETPGTSESATPESGPGSEPATSGSETPGTSESATPESGPGTSTEPSEGSAPGSPAGSPTSTEEGTSESATPESGPGSEPATSGSETPGTSESATPESGPGSPAGSPTSTEEGSPAGSPTSTEEGTSTEPSEGSAPGTSESATPESGPGTSESATPESGPGTSESATPESGPGSEPATSGSETPGSEPATSGSETPGSPAGSPTSTEEGTSTEPSEGSAPGTSTEPSEGSAPGGSAPEAGRSANHTPAGLTGPATSGSETPGTDIQMTQSPSSLSASVGDRVTITCQASQDISNYLNWYQQKPGKAPKLLIYDASNLETGVPSRFSGSGSGTDFTFTISRLQPEDTATYFCQHFDHLPLAFGGGTKVEIKGATPPETGAETESPGETTGGSAESEPPGEGQVQLQESGPGAVKPSETLSLTCTVSGGSVSSGDYYWTWIRQSPGKGLEWIGHIYYSGNTNYNPSLKSRLTISIDTSKTQFSLKLSSVTAADTATYYCVRDRVTGAFDIWGQGTAVTVSSGGGGSELVVTQEPSLTVSPGGTVTLTCRSSNGEVTTSNYANWVQQKPGQAPRGLIGGTIKRAPGTPARFSGSLLGGKAALTLSGVQPEDEAVYYCALWYPNLWVFGGGTKLTVLGATPPETGAETESPGETTGGSAESEPPGEGEVQLLESGGGIVQPGGSLKLSCAASGFTFNTYAMNWVRQAPGKGLEWVARIRSKYNNYATYYADSVKDRFTISRDDSKNTVYLQMNNLKTEDTAVYYCVRHENFGNSYVSWFAHWGQGTLVTVSSGTAEAASASGEAGRSANHTPAGLTGPPGSPAGSPTSTEEGTSESATPESGPGTSTEPSEGSAPGSPAGSPTSTEEGTSTEPSEGSAPGTSTEPSEGSAPGTSESATPESGPGSEPATSGSETPGSEPATSGSETPGSPAGSPTSTEEGTSESATPESGPGTSTEPSEGSAPGTSTEPSEGSAPGSPAGSPTSTEEGTSTEPSEGSAPGTSTEPSEGSAPGTSESATPESGPGTSTEPSEGSAPGTSESATPESGPGSEPATSGSETPGTSTEPSEGSAPGTSTEPSEGSAPGTSESATPESGPGTSESATPESGPGSPAGSPTSTEEGTSESATPESGPGSEPATSGSETPGTSESATPESGPGTSTEPSEGSAPGTSTEPSEGSAPGTSTEPSEGSAPGTSTEPSEGSAPGTSTEPSEGSAPGTSTEPSEGSAPGSPAGSPTSTEEGTSTEPSEGSAPGTSESATPESGPGSEPATSGSETPGTSESATPESGPGSEPATSGSETPGTSESATPESGPGTSTEPSEGSAPGTSESATPESGPGSPAGSPTSTEEGSPAGSPTSTEEGSPAGSPTSTEEGTSESATPESGPGTSTEPSEGSAPGTSESATPESGPGSEPATSGSETPGTSESATPESGPGSEPATSGSETPGTSESATPESGPGTSTEPSEGSAPGSPAGSPTSTEEGTSESATPESGPGSEPATSGSETPGTSESATPESGPGSPAGSPTSTEEGSPAGSPTSTEEGTSTEPSEGSAPGTSESATPESGPGTSESATPESGPGTSESATPESGPGSEPATSGSETPGSEPATSGSETPGSPAGSPTSTEEGTSTEPSEGSAPGTSTEPSEGSAPGSEPATSGSETPGTSESATPESGPGTSTEPSEGAAEPEA

SEQ ID NO: 1024 - protein, 1743 aa, Artificial Sequence
  Description of Artificial Sequence: Synthetic polypeptide
HHHHHHSPAGSPTSTEEGTSESATPESGPGTSTEPSEGSAPGTSESATPESGPGSEPATSGSETPGTSESATPESGPGSEPATSGSETPGTSESATPESGPGTSTEPSEGSAPGSPAGSPTSTEEGTSESATPESGPGSEPATSGSETPGTSESATPESGPGSPAGSPTSTEEGSPAGSPTSTEEGTSTEPSEGSAPGTSESATPESGPGTSESATPESGPGTSESATPESGPGSEPATSGSETPGSEPATSGSETPGSPAGSPTSTEEGTSTEPSEGSAPGTSTEPSEGSAPGGSAPEAGRSANHTPAGLTGPATSGSETPGTDIQMTQSPSSLSASVGDRVTITCQASQDISNYLNWYQQKPGKAPKLLIYDASNLETGVPSRFSGSGSGTDFTFTISRLQPEDTATYFCQHFDHLPLAFGGGTKVEIKGATPPETGAETESPGETTGGSAESEPPGEGQVQLQESGPGAVKPSETLSLTCTVSGGSVSSGDYYWTWIRQSPGKGLEWIGHIYYSGNTNYNPSLKSRLTISIDTSKTQFSLKLSSVTAADTATYYCVRDRVTGAFDIWGQGTAVTVSSGGGGSELVVTQEPSHTVSPGGTVTLTCRSSTGAVTSSNYANWVQQKPGQAPRGLIGGTIKRAPGTPARFSGSLLGGKAALTLSGVQPEDEAEYYCALWYPNLWVFGGGTKLTVLGATPPETGAETESPGETTGGSAESEPPGEGEVQLLESGGGIVQPGGSLKLSCAASGFTFNTYAMNWVRQAPGKGLEWVARIRSKYNNYATYYADSVKDRFTISRDDSKNTVYLQMNNLKTEDTAVYYCVRHENFGNSYVSWFAHWGQGTLVTVSSGTAEAASASGEAGRSANHTPAGLTGPPGSPAGSPTSTEEGTSESATPESGPGTSTEPSEGSAPGSPAGSPTSTEEGTSTEPSEGSAPGTSTEPSEGSAPGTSESATPESGPGSEPATSGSETPGSEPATSGSETPGSPAGSPTSTEEGTSESATPESGPGTSTEPSEGSAPGTSTEPSEGSAPGSPAGSPTSTEEGTSTEPSEGSAPGTSTEPSEGSAPGTSESATPESGPGTSTEPSEGSAPGTSESATPESGPGSEPATSGSETPGTSTEPSEGSAPGTSTEPSEGSAPGTSESATPESGPGTSESATPESGPGSPAGSPTSTEEGTSESATPESGPGSEPATSGSETPGTSESATPESGPGTSTEPSEGSAPGTSTEPSEGSAPGTSTEPSEGSAPGTSTEPSEGSAPGTSTEPSEGSAPGTSTEPSEGSAPGSPAGSPTSTEEGTSTEPSEGSAPGTSESATPESGPGSEPATSGSETPGTSESATPESGPGSEPATSGSETPGTSESATPESGPGTSTEPSEGSAPGTSESATPESGPGSPAGSPTSTEEGSPAGSPTSTEEGSPAGSPTSTEEGTSESATPESGPGTSTEPSEGSAPGTSESATPESGPGSEPATSGSETPGTSESATPESGPGSEPATSGSETPGTSESATPESGPGTSTEPSEGSAPGSPAGSPTSTEEGTSESATPESGPGSEPATSGSETPGTSESATPESGPGSPAGSPTSTEEGSPAGSPTSTEEGTSTEPSEGSAPGTSESATPESGPGTSESATPESGPGTSESATPESGPGSEPATSGSETPGSEPATSGSETPGSPAGSPTSTEEGTSTEPSEGSAPGTSTEPSEGSAPGSEPATSGSETPGTSESATPESGPGTSTEPSEGAAEPEA

SEQ ID NO: 1025 - protein, 1743 aa, Artificial Sequence
  Description of Artificial Sequence: Synthetic polypeptide
HHHHHHSPAGSPTSTEEGTSESATPESGPGTSTEPSEGSAPGTSESATPESGPGSEPATSGSETPGTSESATPESGPGSEPATSGSETPGTSESATPESGPGTSTEPSEGSAPGSPAGSPTSTEEGTSESATPESGPGSEPATSGSETPGTSESATPESGPGSPAGSPTSTEEGSPAGSPTSTEEGTSTEPSEGSAPGTSESATPESGPGTSESATPESGPGTSESATPESGPGSEPATSGSETPGSEPATSGSETPGSPAGSPTSTEEGTSTEPSEGSAPGTSTEPSEGSAPGGSAPEAGRSANHTPAGLTGPATSGSETPGTDIQMTQSPSSLSASVGDRVTITCQASQDISNYLNWYQQKPGKAPKLLIYDASNLETGVPSRFSGSGSGTDFTFTISRLQPEDTATYFCQHFDHLPLAFGGGTKVEIKGATPPETGAETESPGETTGGSAESEPPGEGQVQLQESGPGAVKPSETLSLTCTVSGGSVSSGDYYWTWIRQSPGKGLEWIGHIYYSGNTNYNPSLKSRLTISIDTSKTQFSLKLSSVTAADTATYYCVRDRVTGAFDIWGQGTAVTVSSGGGGSELVVTQEPSHTVSPGGTVTLTCRSSTGEVTTSNYANWVQQKPGQAPRGLIGGTIKRAPGTPARFSGSLLGGKAALTLSGVQPEDEAEYYCALWYPNLWVFGGGTKLTVLGATPPETGAETESPGETTGGSAESEPPGEGEVQLLESGGGIVQPGGSLKLSCAASGFTFNTYAMNWVRQAPGKGLEWVARIRSKYNNYATYYADSVKDRFTISRDDSKNTVYLQMNNLKTEDTAVYYCVRHENFGNSYVSWFAHWGQGTLVTVSSGTAEAASASGEAGRSANHTPAGLTGPPGSPAGSPTSTEEGTSESATPESGPGTSTEPSEGSAPGSPAGSPTSTEEGTSTEPSEGSAPGTSTEPSEGSAPGTSESATPESGPGSEPATSGSETPGSEPATSGSETPGSPAGSPTSTEEGTSESATPESGPGTSTEPSEGSAPGTSTEPSEGSAPGSPAGSPTSTEEGTSTEPSEGSAPGTSTEPSEGSAPGTSESATPESGPGTSTEPSEGSAPGTSESATPESGPGSEPATSGSETPGTSTEPSEGSAPGTSTEPSEGSAPGTSESATPESGPGTSESATPESGPGSPAGSPTSTEEGTSESATPESGPGSEPATSGSETPGTSESATPESGPGTSTEPSEGSAPGTSTEPSEGSAPGTSTEPSEGSAPGTSTEPSEGSAPGTSTEPSEGSAPGTSTEPSEGSAPGSPAGSPTSTEEGTSTEPSEGSAPGTSESATPESGPGSEPATSGSETPGTSESATPESGPGSEPATSGSETPGTSESATPESGPGTSTEPSEGSAPGTSESATPESGPGSPAGSPTSTEEGSPAGSPTSTEEGSPAGSPTSTEEGTSESATPESGPGTSTEPSEGSAPGTSESATPESGPGSEPATSGSETPGTSESATPESGPGSEPATSGSETPGTSESATPESGPGTSTEPSEGSAPGSPAGSPTSTEEGTSESATPESGPGSEPATSGSETPGTSESATPESGPGSPAGSPTSTEEGSPAGSPTSTEEGTSTEPSEGSAPGTSESATPESGPGTSESATPESGPGTSESATPESGPGSEPATSGSETPGSEPATSGSETPGSPAGSPTSTEEGTSTEPSEGSAPGTSTEPSEGSAPGSEPATSGSETPGTSESATPESGPGTSTEPSEGAAEPEA

SEQ ID NO: 1026 - protein, 1743 aa, Artificial Sequence
  Description of Artificial Sequence: Synthetic polypeptide
HHHHHHSPAGSPTSTEEGTSESATPESGPGTSTEPSEGSAPGTSESATPESGPGSEPATSGSETPGTSESATPESGPGSEPATSGSETPGTSESATPESGPGTSTEPSEGSAPGSPAGSPTSTEEGTSESATPESGPGSEPATSGSETPGTSESATPESGPGSPAGSPTSTEEGSPAGSPTSTEEGTSTEPSEGSAPGTSESATPESGPGTSESATPESGPGTSESATPESGPGSEPATSGSETPGSEPATSGSETPGSPAGSPTSTEEGTSTEPSEGSAPGTSTEPSEGSAPGGSAPEAGRSANHTPAGLTGPATSGSETPGTDIQMTQSPSSLSASVGDRVTITCQASQDISNYLNWYQQKPGKAPKLLIYDASNLETGVPSRFSGSGSGTDFTFTISRLQPEDTATYFCQHFDHLPLAFGGGTKVEIKGATPPETGAETESPGETTGGSAESEPPGEGQVQLQESGPGAVKPSETLSLTCTVSGGSVSSGDYYWTWIRQSPGKGLEWIGHIYYSGNTNYNPSLKSRLTISIDTSKTQFSLKLSSVTAADTATYYCVRDRVTGAFDIWGQGTAVTVSSGGGGSELVVTQEPSLTVSPGGTVTLTCRSSNGAVTSSNYANWVQQKPGQAPRGLIGGTNKRAPGTPARFSGSSLGGKAALTLSGVQPEDEAVYYCALWYPNLWVFGGGTKLTVLGATPPETGAETESPGETTGGSAESEPPGEGEVQLQESGGGIVQPGGSLKLSCAASGFTFNTYAMNWVRQAPGKGLEWVARIRSKYNNYATYYADSVKDRFTISRDDSKNTVYLQMNNLKTEDTAVYYCVRHENFGNSYVSWFAHWGQGTLVTVSSGTAEAASASGEAGRSANHTPAGLTGPPGSPAGSPTSTEEGTSESATPESGPGTSTEPSEGSAPGSPAGSPTSTEEGTSTEPSEGSAPGTSTEPSEGSAPGTSESATPESGPGSEPATSGSETPGSEPATSGSETPGSPAGSPTSTEEGTSESATPESGPGTSTEPSEGSAPGTSTEPSEGSAPGSPAGSPTSTEEGTSTEPSEGSAPGTSTEPSEGSAPGTSESATPESGPGTSTEPSEGSAPGTSESATPESGPGSEPATSGSETPGTSTEPSEGSAPGTSTEPSEGSAPGTSESATPESGPGTSESATPESGPGSPAGSPTSTEEGTSESATPESGPGSEPATSGSETPGTSESATPESGPGTSTEPSEGSAPGTSTEPSEGSAPGTSTEPSEGSAPGTSTEPSEGSAPGTSTEPSEGSAPGTSTEPSEGSAPGSPAGSPTSTEEGTSTEPSEGSAPGTSESATPESGPGSEPATSGSETPGTSESATPESGPGSEPATSGSETPGTSESATPESGPGTSTEPSEGSAPGTSESATPESGPGSPAGSPTSTEEGSPAGSPTSTEEGSPAGSPTSTEEGTSESATPESGPGTSTEPSEGSAPGTSESATPESGPGSEPATSGSETPGTSESATPESGPGSEPATSGSETPGTSESATPESGPGTSTEPSEGSAPGSPAGSPTSTEEGTSESATPESGPGSEPATSGSETPGTSESATPESGPGSPAGSPTSTEEGSPAGSPTSTEEGTSTEPSEGSAPGTSESATPESGPGTSESATPESGPGTSESATPESGPGSEPATSGSETPGSEPATSGSETPGSPAGSPTSTEEGTSTEPSEGSAPGTSTEPSEGSAPGSEPATSGSETPGTSESATPESGPGTSTEPSEGAAEPEA

SEQ ID NO: 1027 - protein, 1743 aa, Artificial Sequence
  Description of Artificial Sequence: Synthetic polypeptide
HHHHHHSPAGSPTSTEEGTSESATPESGPGTSTEPSEGSAPGTSESATPESGPGSEPATSGSETPGTSESATPESGPGSEPATSGSETPGTSESATPESGPGTSTEPSEGSAPGSPAGSPTSTEEGTSESATPESGPGSEPATSGSETPGTSESATPESGPGSPAGSPTSTEEGSPAGSPTSTEEGTSTEPSEGSAPGTSESATPESGPGTSESATPESGPGTSESATPESGPGSEPATSGSETPGSEPATSGSETPGSPAGSPTSTEEGTSTEPSEGSAPGTSTEPSEGSAPGGSAPEAGRSANHTPAGLTGPATSGSETPGTDIQMTQSPSSLSASVGDRVTITCQASQDISNYLNWYQQKPGKAPKLLIYDASNLETGVPSRFSGSGSGTDFTFTISRLQPEDTATYFCQHFDHLPLAFGGGTKVEIKGATPPETGAETESPGETTGGSAESEPPGEGQVQLQESGPGAVKPSETLSLTCTVSGGSVSSGDYYWTWIRQSPGKGLEWIGHIYYSGNTNYNPSLKSRLTISIDTSKTQFSLKLSSVTAADTATYYCVRDRVTGAFDIWGQGTAVTVSSGGGGSELVVTQEPSLTVSPGGTVTLTCRSSNGAVTSSNYANWVQQKPGQAPRGLIGGTNKRAPGTPARFSGSLLGGSAALTLSGVQPEDEAVYYCALWYPNLWVFGGGTKLTVLGATPPETGAETESPGETTGGSAESEPPGEGEVQLQESGGGIVQPGGSLKLSCAASGFTFNTYAMNWVRQAPGKGLEWVARIRSKYNNYATYYADSVKDRFTISRDDSKNTVYLQMNNLKTEDTAVYYCVRHENFGNSYVSWFAHWGQGTLVTVSSGTAEAASASGEAGRSANHTPAGLTGPPGSPAGSPTSTEEGTSESATPESGPGTSTEPSEGSAPGSPAGSPTSTEEGTSTEPSEGSAPGTSTEPSEGSAPGTSESATPESGPGSEPATSGSETPGSEPATSGSETPGSPAGSPTSTEEGTSESATPESGPGTSTEPSEGSAPGTSTEPSEGSAPGSPAGSPTSTEEGTSTEPSEGSAPGTSTEPSEGSAPGTSESATPESGPGTSTEPSEGSAPGTSESATPESGPGSEPATSGSETPGTSTEPSEGSAPGTSTEPSEGSAPGTSESATPESGPGTSESATPESGPGSPAGSPTSTEEGTSESATPESGPGSEPATSGSETPGTSESATPESGPGTSTEPSEGSAPGTSTEPSEGSAPGTSTEPSEGSAPGTSTEPSEGSAPGTSTEPSEGSAPGTSTEPSEGSAPGSPAGSPTSTEEGTSTEPSEGSAPGTSESATPESGPGSEPATSGSETPGTSESATPESGPGSEPATSGSETPGTSESATPESGPGTSTEPSEGSAPGTSESATPESGPGSPAGSPTSTEEGSPAGSPTSTEEGSPAGSPTSTEEGTSESATPESGPGTSTEPSEGSAPGTSESATPESGPGSEPATSGSETPGTSESATPESGPGSEPATSGSETPGTSESATPESGPGTSTEPSEGSAPGSPAGSPTSTEEGTSESATPESGPGSEPATSGSETPGTSESATPESGPGSPAGSPTSTEEGSPAGSPTSTEEGTSTEPSEGSAPGTSESATPESGPGTSESATPESGPGTSESATPESGPGSEPATSGSETPGSEPATSGSETPGSPAGSPTSTEEGTSTEPSEGSAPGTSTEPSEGSAPGSEPATSGSETPGTSESATPESGPGTSTEPSEGAAEPEA

SEQ ID NO: 1028 - protein, 1020 aa, Artificial Sequence
  Description of Artificial Sequence: Synthetic polypeptide
HHHHHHGSPAGSPTSTEEGTSESATPESGPGTSTEPSEGSAPGSPAGSPTSTEEGTSTEPSEGSAPGTSTEPSEGSAPGTSESATPESGPGSEPATSGSETPGSEPATSGSETPGSPAGSPTSTEEGTSESATPESGPGTSTEPSEGSAPEAGRSANHTPAGLTGPATSGSETPGTDIQMTQSPSSLSASVGDRVTITCQASQDISNYLNWYQQKPGKAPKLLIYDASNLETGVPSRFSGSGSGTDFTFTISSLQPEDIATYFCQHFDHLPLAFGGGTKVEIKGATPPETGAETESPGETTGGSAESEPPGEGQVQLQESGPGLVKPSETLSLTCTVSGGSVSSGDYYWTWIRQSPGKGLEWIGHIYYSGNTNYNPSLKSRLTISIDTSKTQFSLKLSSVTAADTAIYYCVRDRVTGAFDIWGQGTMVTVSSGGGGSELVVTQEPSLTVSPGGTVTLTCRSSNGAVTSSNYANWVQQKPGQAPRGLIGGTNKRAPGTPARFSGSLLGGKAALTLSGVQPEDEAVYYCALWYPNLWVFGGGTKLTVLGATPPETGAETESPGETTGGSAESEPPGEGEVQLLESGGGIVQPGGSLKLSCAASGFTFNTYAMNWVRQAPGKGLEWVARIRSKYNNYATYYADSVKDRFTISRDDSKNTVYLQMNNLKTEDTAVYYCVRHENFGNSYVSWFAHWGQGTLVTVSSGTAEAASASGEAGRSANHTPAGLTGPPGSPAGSPTSTEEGTSESATPESGPGTSTEPSEGSAPGSPAGSPTSTEEGTSTEPSEGSAPGTSTEPSEGSAPGTSESATPESGPGSEPATSGSETPGSEPATSGSETPGSPAGSPTSTEEGTSESATPESGPGTSTEPSEGSAPGTSTEPSEGSAPGSPAGSPTSTEEGTSTEPSEGSAPGTSTEPSEGSAPGTSESATPESGPGTSTEPSEGSAPGTSESATPESGPGSEPATSGSETPGTSTEPSEGSAPGTSTEPSEGSAPGTSESATPESGPGTSESATPEGAAEPEA

SEQ ID NO: 1029 - protein, 1020 aa, Artificial Sequence
  Description of Artificial Sequence: Synthetic polypeptide
HHHHHHGSPAGSPTSTEEGTSESATPESGPGTSTEPSEGSAPGSPAGSPTSTEEGTSTEPSEGSAPGTSTEPSEGSAPGTSESATPESGPGSEPATSGSETPGSEPATSGSETPGSPAGSPTSTEEGTSESATPESGPGTSTEPSEGSAPEAGRSANHTPAGLTGPATSGSETPGTDIQMTQSPSSLSASVGDRVTITCQASQDISNYLNWYQQKPGKAPKLLIYDASNLETGVPSRFSGSGSGTDFTFTISSLQPEDIATYFCQHFDHLPLAFGGGTKVEIKGATPPETGAETESPGETTGGSAESEPPGEGQVQLQESGPGLVKPSETLSLTCTVSGGSVSSGDYYWTWIRQSPGKGLEWIGHIYYSGNTNYNPSLKSRLTISIDTSKTQFSLKLSSVTAADTAIYYCVRDRVTGAFDIWGQGTMVTVSSGGGGSELVVTQEPSLTVSPGGTVTLTCRSSNGEVTTSNYANWVQQKPGQAPRGLIGGTIKRAPGTPARFSGSLLGGKAALTLSGVQPEDEAVYYCALWYPNLWVFGGGTKLTVLGATPPETGAETESPGETTGGSAESEPPGEGEVQLLESGGGIVQPGGSLKLSCAASGFTFNTYAMNWVRQAPGKGLEWVARIRSKYNNYATYYADSVKDRFTISRDDSKNTVYLQMNNLKTEDTAVYYCVRHENFGNSYVSWFAHWGQGTLVTVSSGTAEAASASGEAGRSANHTPAGLTGPPGSPAGSPTSTEEGTSESATPESGPGTSTEPSEGSAPGSPAGSPTSTEEGTSTEPSEGSAPGTSTEPSEGSAPGTSESATPESGPGSEPATSGSETPGSEPATSGSETPGSPAGSPTSTEEGTSESATPESGPGTSTEPSEGSAPGTSTEPSEGSAPGSPAGSPTSTEEGTSTEPSEGSAPGTSTEPSEGSAPGTSESATPESGPGTSTEPSEGSAPGTSESATPESGPGSEPATSGSETPGTSTEPSEGSAPGTSTEPSEGSAPGTSESATPESGPGTSESATPEGAAEPEA

SEQ ID NO: 1030 - protein, 1020 aa, Artificial Sequence
  Description of Artificial Sequence: Synthetic polypeptide
HHHHHHGSPAGSPTSTEEGTSESATPESGPGTSTEPSEGSAPGSPAGSPTSTEEGTSTEPSEGSAPGTSTEPSEGSAPGTSESATPESGPGSEPATSGSETPGSEPATSGSETPGSPAGSPTSTEEGTSESATPESGPGTSTEPSEGSAPEAGRSANHTPAGLTGPATSGSETPGTDIQMTQSPSSLSASVGDRVTITCQASQDISNYLNWYQQKPGKAPKLLIYDASNLETGVPSRFSGSGSGTDFTFTISSLQPEDIATYFCQHFDHLPLAFGGGTKVEIKGATPPETGAETESPGETTGGSAESEPPGEGQVQLQESGPGLVKPSETLSLTCTVSGGSVSSGDYYWTWIRQSPGKGLEWIGHIYYSGNTNYNPSLKSRLTISIDTSKTQFSLKLSSVTAADTAIYYCVRDRVTGAFDIWGQGTMVTVSSGGGGSELVVTQEPSHTVSPGGTVTLTCRSSTGAVTSSNYANWVQQKPGQAPRGLIGGTIKRAPGTPARFSGSLLGGKAALTLSGVQPEDEAEYYCALWYPNLWVFGGGTKLTVLGATPPETGAETESPGETTGGSAESEPPGEGEVQLLESGGGIVQPGGSLKLSCAASGFTFNTYAMNWVRQAPGKGLEWVARIRSKYNNYATYYADSVKDRFTISRDDSKNTVYLQMNNLKTEDTAVYYCVRHENFGNSYVSWFAHWGQGTLVTVSSGTAEAASASGEAGRSANHTPAGLTGPPGSPAGSPTSTEEGTSESATPESGPGTSTEPSEGSAPGSPAGSPTSTEEGTSTEPSEGSAPGTSTEPSEGSAPGTSESATPESGPGSEPATSGSETPGSEPATSGSETPGSPAGSPTSTEEGTSESATPESGPGTSTEPSEGSAPGTSTEPSEGSAPGSPAGSPTSTEEGTSTEPSEGSAPGTSTEPSEGSAPGTSESATPESGPGTSTEPSEGSAPGTSESATPESGPGSEPATSGSETPGTSTEPSEGSAPGTSTEPSEGSAPGTSESATPESGPGTSESATPEGAAEPEA

SEQ ID NO: 1031 - protein, 1020 aa, Artificial Sequence
  Description of Artificial Sequence: Synthetic polypeptide
HHHHHHGSPAGSPTSTEEGTSESATPESGPGTSTEPSEGSAPGSPAGSPTSTEEGTSTEPSEGSAPGTSTEPSEGSAPGTSESATPESGPGSEPATSGSETPGSEPATSGSETPGSPAGSPTSTEEGTSESATPESGPGTSTEPSEGSAPEAGRSANHTPAGLTGPATSGSETPGTDIQMTQSPSSLSASVGDRVTITCQASQDISNYLNWYQQKPGKAPKLLIYDASNLETGVPSRFSGSGSGTDFTFTISSLQPEDIATYFCQHFDHLPLAFGGGTKVEIKGATPPETGAETESPGETTGGSAESEPPGEGQVQLQESGPGLVKPSETLSLTCTVSGGSVSSGDYYWTWIRQSPGKGLEWIGHIYYSGNTNYNPSLKSRLTISIDTSKTQFSLKLSSVTAADTAIYYCVRDRVTGAFDIWGQGTMVTVSSGGGGSELVVTQEPSHTVSPGGTVTLTCRSSTGEVTTSNYANWVQQKPGQAPRGLIGGTIKRAPGTPARFSGSLLGGKAALTLSGVQPEDEAEYYCALWYPNLWVFGGGTKLTVLGATPPETGAETESPGETTGGSAESEPPGEGEVQLLESGGGIVQPGGSLKLSCAASGFTFNTYAMNWVRQAPGKGLEWVARIRSKYNNYATYYADSVKDRFTISRDDSKNTVYLQMNNLKTEDTAVYYCVRHENFGNSYVSWFAHWGQGTLVTVSSGTAEAASASGEAGRSANHTPAGLTGPPGSPAGSPTSTEEGTSESATPESGPGTSTEPSEGSAPGSPAGSPTSTEEGTSTEPSEGSAPGTSTEPSEGSAPGTSESATPESGPGSEPATSGSETPGSEPATSGSETPGSPAGSPTSTEEGTSESATPESGPGTSTEPSEGSAPGTSTEPSEGSAPGSPAGSPTSTEEGTSTEPSEGSAPGTSTEPSEGSAPGTSESATPESGPGTSTEPSEGSAPGTSESATPESGPGSEPATSGSETPGTSTEPSEGSAPGTSTEPSEGSAPGTSESATPESGPGTSESATPEGAAEPEA

SEQ ID NO: 1032 - protein, 1020 aa, Artificial Sequence
  Description of Artificial Sequence: Synthetic polypeptide
HHHHHHGSPAGSPTSTEEGTSESATPESGPGTSTEPSEGSAPGSPAGSPTSTEEGTSTEPSEGSAPGTSTEPSEGSAPGTSESATPESGPGSEPATSGSETPGSEPATSGSETPGSPAGSPTSTEEGTSESATPESGPGTSTEPSEGSAPEAGRSANHTPAGLTGPATSGSETPGTDIQMTQSPSSLSASVGDRVTITCQASQDISNYLNWYQQKPGKAPKLLIYDASNLETGVPSRFSGSGSGTDFTFTISSLQPEDIATYFCQHFDHLPLAFGGGTKVEIKGATPPETGAETESPGETTGGSAESEPPGEGQVQLQESGPGLVKPSETLSLTCTVSGGSVSSGDYYWTWIRQSPGKGLEWIGHIYYSGNTNYNPSLKSRLTISIDTSKTQFSLKLSSVTAADTAIYYCVRDRVTGAFDIWGQGTMVTVSSGGGGSELVVTQEPSLTVSPGGTVTLTCRSSNGAVTSSNYANWVQQKPGQAPRGLIGGTNKRAPGTPARFSGSSLGGKAALTLSGVQPEDEAVYYCALWYPNLWVFGGGTKLTVLGATPPETGAETESPGETTGGSAESEPPGEGEVQLQESGGGIVQPGGSLKLSCAASGFTFNTYAMNWVRQAPGKGLEWVARIRSKYNNYATYYADSVKDRFTISRDDSKNTVYLQMNNLKTEDTAVYYCVRHENFGNSYVSWFAHWGQGTLVTVSSGTAEAASASGEAGRSANHTPAGLTGPPGSPAGSPTSTEEGTSESATPESGPGTSTEPSEGSAPGSPAGSPTSTEEGTSTEPSEGSAPGTSTEPSEGSAPGTSESATPESGPGSEPATSGSETPGSEPATSGSETPGSPAGSPTSTEEGTSESATPESGPGTSTEPSEGSAPGTSTEPSEGSAPGSPAGSPTSTEEGTSTEPSEGSAPGTSTEPSEGSAPGTSESATPESGPGTSTEPSEGSAPGTSESATPESGPGSEPATSGSETPGTSTEPSEGSAPGTSTEPSEGSAPGTSESATPESGPGTSESATPEGAAEPEA

SEQ ID NO: 1033 - protein, 1020 aa, Artificial Sequence
  Description of Artificial Sequence: Synthetic polypeptide
HHHHHHGSPAGSPTSTEEGTSESATPESGPGTSTEPSEGSAPGSPAGSPTSTEEGTSTEPSEGSAPGTSTEPSEGSAPGTSESATPESGPGSEPATSGSETPGSEPATSGSETPGSPAGSPTSTEEGTSESATPESGPGTSTEPSEGSAPEAGRSANHTPAGLTGPATSGSETPGTDIQMTQSPSSLSASVGDRVTITCQASQDISNYLNWYQQKPGKAPKLLIYDASNLETGVPSRFSGSGSGTDFTFTISSLQPEDIATYFCQHFDHLPLAFGGGTKVEIKGATPPETGAETESPGETTGGSAESEPPGEGQVQLQESGPGLVKPSETLSLTCTVSGGSVSSGDYYWTWIRQSPGKGLEWIGHIYYSGNTNYNPSLKSRLTISIDTSKTQFSLKLSSVTAADTAIYYCVRDRVTGAFDIWGQGTMVTVSSGGGGSELVVTQEPSLTVSPGGTVTLTCRSSNGAVTSSNYANWVQQKPGQAPRGLIGGTNKRAPGTPARFSGSLLGGSAALTLSGVQPEDEAVYYCALWYPNLWVFGGGTKLTVLGATPPETGAETESPGETTGGSAESEPPGEGEVQLQESGGGIVQPGGSLKLSCAASGFTFNTYAMNWVRQAPGKGLEWVARIRSKYNNYATYYADSVKDRFTISRDDSKNTVYLQMNNLKTEDTAVYYCVRHENFGNSYVSWFAHWGQGTLVTVSSGTAEAASASGEAGRSANHTPAGLTGPPGSPAGSPTSTEEGTSESATPESGPGTSTEPSEGSAPGSPAGSPTSTEEGTSTEPSEGSAPGTSTEPSEGSAPGTSESATPESGPGSEPATSGSETPGSEPATSGSETPGSPAGSPTSTEEGTSESATPESGPGTSTEPSEGSAPGTSTEPSEGSAPGSPAGSPTSTEEGTSTEPSEGSAPGTSTEPSEGSAPGTSESATPESGPGTSTEPSEGSAPGTSESATPESGPGSEPATSGSETPGTSTEPSEGSAPGTSTEPSEGSAPGTSESATPESGPGTSESATPEGAAEPEA

SEQ ID NO: 1034 - protein, 1020 aa, Artificial Sequence
  Description of Artificial Sequence: Synthetic polypeptide
HHHHHHGSPAGSPTSTEEGTSESATPESGPGTSTEPSEGSAPGSPAGSPTSTEEGTSTEPSEGSAPGTSTEPSEGSAPGTSESATPESGPGSEPATSGSETPGSEPATSGSETPGSPAGSPTSTEEGTSESATPESGPGTSTEPSEGSAPEAGRSANHTPAGLTGPATSGSETPGTDIQMTQSPSSLSASVGDRVTITCQASQDISNYLNWYQQKPGKAPKLLIYDASNLETGVPSRFSGSGSGTDFTFTISSLQPEDIATYFCQHFDHLPLAFGGGTKVEIKGATPPETGAETESPGETTGGSAESEPPGEGQVQLQESGPGLVKPSETLSLTCTVSGGSVSSGDYYWTWIRQSPGKGLEWIGHIYYSGNTNYNPSLKSRLTISIDTSKTQFSLKLSSVTAADTAIYYCVRDRVTGAFDIWGQGTMVTVSSGGGGSELVVTQEPSLTVSPGGTVTLTCRSSNGAVTSSNYANWVQQKPGQAPRGLIGGTNKRAPGTPARFSGSSLGGSAALTLSGVQPEDEAVYYCALWYPNLWVFGGGTKLTVLGATPPETGAETESPGETTGGSAESEPPGEGEVQLQESGGGIVQPGGSLKLSCAASGFTFNTYAMNWVRQAPGKGLEWVARIRSKYNNYATYYADSVKDRFTISRDDSKNTVYLQMNNLKTEDTAVYYCVRHENFGNSYVSWFAHWGQGTLVTVSSGTAEAASASGEAGRSANHTPAGLTGPPGSPAGSPTSTEEGTSESATPESGPGTSTEPSEGSAPGSPAGSPTSTEEGTSTEPSEGSAPGTSTEPSEGSAPGTSESATPESGPGSEPATSGSETPGSEPATSGSETPGSPAGSPTSTEEGTSESATPESGPGTSTEPSEGSAPGTSTEPSEGSAPGSPAGSPTSTEEGTSTEPSEGSAPGTSTEPSEGSAPGTSESATPESGPGTSTEPSEGSAPGTSESATPESGPGSEPATSGSETPGTSTEPSEGSAPGTSTEPSEGSAPGTSESATPESGPGTSESATPEGAAEPEA

SEQ ID NO: 1035 - protein, 1020 aa, Artificial Sequence
  Description of Artificial Sequence: Synthetic polypeptide
HHHHHHGSPAGSPTSTEEGTSESATPESGPGTSTEPSEGSAPGSPAGSPTSTEEGTSTEPSEGSAPGTSTEPSEGSAPGTSESATPESGPGSEPATSGSETPGSEPATSGSETPGSPAGSPTSTEEGTSESATPESGPGTSTEPSEGSAPEAGRSANHTPAGLTGPATSGSETPGTDIQMTQSPSSLSASVGDRVTITCQASQDISNYLNWYQQKPGKAPKLLIYDASNLETGVPSRFSGSGSGTDFTFTISSLQPEDIATYFCQHFDHLPLAFGGGTKVEIKGATPPETGAETESPGETTGGSAESEPPGEGQVQLQESGPGLVKPSETLSLTCTVSGGSVSSGDYYWTWIRQSPGKGLEWIGHIYYSGNTNYNPSLKSRLTISIDTSKTQFSLKLSSVTAADTAIYYCVRDRVTGAFDIWGQGTMVTVSSGGGGSELVVTQEPSLTVSPGGTVTLTCRSSTGAVTTSNYANWVQQKPGQAPRGLIGGTNKRAPGTPARFSGSSLGGSAALTLSGVQPEDEAEYYCALWYSNLWVFGGGTKLTVLGATPPETGAETESPGETTGGSAESEPPGEGEVQLQESGGGLVQPGGSLKLSCAASGFTFNTYAMNWVRQAPGKGLEWVARIRSKYNNYATYYADSVKDRFTISRDDSKNTAYLQMNNLKTEDTAVYYCVRHGNFGNSYVSWFAYWGQGTLVTVSSGTAEAASASGEAGRSANHTPAGLTGPPGSPAGSPTSTEEGTSESATPESGPGTSTEPSEGSAPGSPAGSPTSTEEGTSTEPSEGSAPGTSTEPSEGSAPGTSESATPESGPGSEPATSGSETPGSEPATSGSETPGSPAGSPTSTEEGTSESATPESGPGTSTEPSEGSAPGTSTEPSEGSAPGSPAGSPTSTEEGTSTEPSEGSAPGTSTEPSEGSAPGTSESATPESGPGTSTEPSEGSAPGTSESATPESGPGSEPATSGSETPGTSTEPSEGSAPGTSTEPSEGSAPGTSESATPESGPGTSESATPEGAAEPEA

SEQ ID NO: 1036 - protein, 1020 aa, Artificial Sequence
  Description of Artificial Sequence: Synthetic polypeptide
HHHHHHGSPAGSPTSTEEGTSESATPESGPGTSTEPSEGSAPGSPAGSPTSTEEGTSTEPSEGSAPGTSTEPSEGSAPGTSESATPESGPGSEPATSGSETPGSEPATSGSETPGSPAGSPTSTEEGTSESATPESGPGTSTEPSEGSAPEAGRSANHTPAGLTGPATSGSETPGTDIQMTQSPSSLSASVGDRVTITCQASQDISNYLNWYQQKPGKAPKLLIYDASNLETGVPSRFSGSGSGTDFTFTISRLQPEDTATYFCQHFDHLPLAFGGGTKVEIKGATPPETGAETESPGETTGGSAESEPPGEGQVQLQESGPGAVKPSETLSLTCTVSGGSVSSGDYYWTWIRQSPGKGLEWIGHIYYSGNTNYNPSLKSRLTISIDTSKTQFSLKLSSVTAADTATYYCVRDRVTGAFDIWGQGTAVTVSSGGGGSELVVTQEPSLTVSPGGTVTLTCRSSNGAVTSSNYANWVQQKPGQAPRGLIGGTNKRAPGTPARFSGSLLGGKAALTLSGVQPEDEAVYYCALWYPNLWVFGGGTKLTVLGATPPETGAETESPGETTGGSAESEPPGEGEVQLLESGGGIVQPGGSLKLSCAASGFTFNTYAMNWVRQAPGKGLEWVARIRSKYNNYATYYADSVKDRFTISRDDSKNTVYLQMNNLKTEDTAVYYCVRHENFGNSYVSWFAHWGQGTLVTVSSGTAEAASASGEAGRSANHTPAGLTGPPGSPAGSPTSTEEGTSESATPESGPGTSTEPSEGSAPGSPAGSPTSTEEGTSTEPSEGSAPGTSTEPSEGSAPGTSESATPESGPGSEPATSGSETPGSEPATSGSETPGSPAGSPTSTEEGTSESATPESGPGTSTEPSEGSAPGTSTEPSEGSAPGSPAGSPTSTEEGTSTEPSEGSAPGTSTEPSEGSAPGTSESATPESGPGTSTEPSEGSAPGTSESATPESGPGSEPATSGSETPGTSTEPSEGSAPGTSTEPSEGSAPGTSESATPESGPGTSESATPEGAAEPEA

SEQ ID NO: 1037 - protein, 1020 aa, Artificial Sequence
  Description of Artificial Sequence: Synthetic polypeptide
HHHHHHGSPAGSPTSTEEGTSESATPESGPGTSTEPSEGSAPGSPAGSPTSTEEGTSTEPSEGSAPGTSTEPSEGSAPGTSESATPESGPGSEPATSGSETPGSEPATSGSETPGSPAGSPTSTEEGTSESATPESGPGTSTEPSEGSAPEAGRSANHTPAGLTGPATSGSETPGTDIQMTQSPSSLSASVGDRVTITCQASQDISNYLNWYQQKPGKAPKLLIYDASNLETGVPSRFSGSGSGTDFTFTISRLQPEDTATYFCQHFDHLPLAFGGGTKVEIKGATPPETGAETESPGETTGGSAESEPPGEGQVQLQESGPGAVKPSETLSLTCTVSGGSVSSGDYYWTWIRQSPGKGLEWIGHIYYSGNTNYNPSLKSRLTISIDTSKTQFSLKLSSVTAADTATYYCVRDRVTGAFDIWGQGTAVTVSSGGGGSELVVTQEPSLTVSPGGTVTLTCRSSNGEVTTSNYANWVQQKPGQAPRGLIGGTIKRAPGTPARFSGSLLGGKAALTLSGVQPEDEAVYYCALWYPNLWVFGGGTKLTVLGATPPETGAETESPGETTGGSAESEPPGEGEVQLLESGGGIVQPGGSLKLSCAASGFTFNTYAMNWVRQAPGKGLEWVARIRSKYNNYATYYADSVKDRFTISRDDSKNTVYLQMNNLKTEDTAVYYCVRHENFGNSYVSWFAHWGQGTLVTVSSGTAEAASASGEAGRSANHTPAGLTGPPGSPAGSPTSTEEGTSESATPESGPGTSTEPSEGSAPGSPAGSPTSTEEGTSTEPSEGSAPGTSTEPSEGSAPGTSESATPESGPGSEPATSGSETPGSEPATSGSETPGSPAGSPTSTEEGTSESATPESGPGTSTEPSEGSAPGTSTEPSEGSAPGSPAGSPTSTEEGTSTEPSEGSAPGTSTEPSEGSAPGTSESATPESGPGTSTEPSEGSAPGTSESATPESGPGSEPATSGSETPGTSTEPSEGSAPGTSTEPSEGSAPGTSESATPESGPGTSESATPEGAAEPEA

SEQ ID NO: 1038 - protein, 1020 aa, Artificial Sequence
  Description of Artificial Sequence: Synthetic polypeptide
HHHHHHGSPAGSPTSTEEGTSESATPESGPGTSTEPSEGSAPGSPAGSPTSTEEGTSTEPSEGSAPGTSTEPSEGSAPGTSESATPESGPGSEPATSGSETPGSEPATSGSETPGSPAGSPTSTEEGTSESATPESGPGTSTEPSEGSAPEAGRSANHTPAGLTGPATSGSETPGTDIQMTQSPSSLSASVGDRVTITCQASQDISNYLNWYQQKPGKAPKLLIYDASNLETGVPSRFSGSGSGTDFTFTISRLQPEDTATYFCQHFDHLPLAFGGGTKVEIKGATPPETGAETESPGETTGGSAESEPPGEGQVQLQESGPGAVKPSETLSLTCTVSGGSVSSGDYYWTWIRQSPGKGLEWIGHIYYSGNTNYNPSLKSRLTISIDTSKTQFSLKLSSVTAADTATYYCVRDRVTGAFDIWGQGTAVTVSSGGGGSELVVTQEPSHTVSPGGTVTLTCRSSTGAVTSSNYANWVQQKPGQAPRGLIGGTIKRAPGTPARFSGSLLGGKAALTLSGVQPEDEAEYYCALWYPNLWVFGGGTKLTVLGATPPETGAETESPGETTGGSAESEPPGEGEVQLLESGGGIVQPGGSLKLSCAASGFTFNTYAMNWVRQAPGKGLEWVARIRSKYNNYATYYADSVKDRFTISRDDSKNTVYLQMNNLKTEDTAVYYCVRHENFGNSYVSWFAHWGQGTLVTVSSGTAEAASASGEAGRSANHTPAGLTGPPGSPAGSPTSTEEGTSESATPESGPGTSTEPSEGSAPGSPAGSPTSTEEGTSTEPSEGSAPGTSTEPSEGSAPGTSESATPESGPGSEPATSGSETPGSEPATSGSETPGSPAGSPTSTEEGTSESATPESGPGTSTEPSEGSAPGTSTEPSEGSAPGSPAGSPTSTEEGTSTEPSEGSAPGTSTEPSEGSAPGTSESATPESGPGTSTEPSEGSAPGTSESATPESGPGSEPATSGSETPGTSTEPSEGSAPGTSTEPSEGSAPGTSESATPESGPGTSESATPEGAAEPEA

SEQ ID NO: 1039 - protein, 1020 aa, Artificial Sequence
  Description of Artificial Sequence: Synthetic polypeptide
HHHHHHGSPAGSPTSTEEGTSESATPESGPGTSTEPSEGSAPGSPAGSPTSTEEGTSTEPSEGSAPGTSTEPSEGSAPGTSESATPESGPGSEPATSGSETPGSEPATSGSETPGSPAGSPTSTEEGTSESATPESGPGTSTEPSEGSAPEAGRSANHTPAGLTGPATSGSETPGTDIQMTQSPSSLSASVGDRVTITCQASQDISNYLNWYQQKPGKAPKLLIYDASNLETGVPSRFSGSGSGTDFTFTISRLQPEDTATYFCQHFDHLPLAFGGGTKVEIKGATPPETGAETESPGETTGGSAESEPPGEGQVQLQESGPGAVKPSETLSLTCTVSGGSVSSGDYYWTWIRQSPGKGLEWIGHIYYSGNTNYNPSLKSRLTISIDTSKTQFSLKLSSVTAADTATYYCVRDRVTGAFDIWGQGTAVTVSSGGGGSELVVTQEPSHTVSPGGTVTLTCRSSTGEVTTSNYANWVQQKPGQAPRGLIGGTIKRAPGTPARFSGSLLGGKAALTLSGVQPEDEAEYYCALWYPNLWVFGGGTKLTVLGATPPETGAETESPGETTGGSAESEPPGEGEVQLLESGGGIVQPGGSLKLSCAASGFTFNTYAMNWVRQAPGKGLEWVARIRSKYNNYATYYADSVKDRFTISRDDSKNTVYLQMNNLKTEDTAVYYCVRHENFGNSYVSWFAHWGQGTLVTVSSGTAEAASASGEAGRSANHTPAGLTGPPGSPAGSPTSTEEGTSESATPESGPGTSTEPSEGSAPGSPAGSPTSTEEGTSTEPSEGSAPGTSTEPSEGSAPGTSESATPESGPGSEPATSGSETPGSEPATSGSETPGSPAGSPTSTEEGTSESATPESGPGTSTEPSEGSAPGTSTEPSEGSAPGSPAGSPTSTEEGTSTEPSEGSAPGTSTEPSEGSAPGTSESATPESGPGTSTEPSEGSAPGTSESATPESGPGSEPATSGSETPGTSTEPSEGSAPGTSTEPSEGSAPGTSESATPESGPGTSESATPEGAAEPEA

SEQ ID NO: 1040 - protein, 1020 aa, Artificial Sequence
  Description of Artificial Sequence: Synthetic polypeptide
HHHHHHGSPAGSPTSTEEGTSESATPESGPGTSTEPSEGSAPGSPAGSPTSTEEGTSTEPSEGSAPGTSTEPSEGSAPGTSESATPESGPGSEPATSGSETPGSEPATSGSETPGSPAGSPTSTEEGTSESATPESGPGTSTEPSEGSAPEAGRSANHTPAGLTGPATSGSETPGTDIQMTQSPSSLSASVGDRVTITCQASQDISNYLNWYQQKPGKAPKLLIYDASNLETGVPSRFSGSGSGTDFTFTISRLQPEDTATYFCQHFDHLPLAFGGGTKVEIKGATPPETGAETESPGETTGGSAESEPPGEGQVQLQESGPGAVKPSETLSLTCTVSGGSVSSGDYYWTWIRQSPGKGLEWIGHIYYSGNTNYNPSLKSRLTISIDTSKTQFSLKLSSVTAADTATYYCVRDRVTGAFDIWGQGTAVTVSSGGGGSELVVTQEPSLTVSPGGTVTLTCRSSNGAVTSSNYANWVQQKPGQAPRGLIGGTNKRAPGTPARFSGSSLGGKAALTLSGVQPEDEAVYYCALWYPNLWVFGGGTKLTVLGATPPETGAETESPGETTGGSAESEPPGEGEVQLQESGGGIVQPGGSLKLSCAASGFTFNTYAMNWVRQAPGKGLEWVARIRSKYNNYATYYADSVKDRFTISRDDSKNTVYLQMNNLKTEDTAVYYCVRHENFGNSYVSWFAHWGQGTLVTVSSGTAEAASASGEAGRSANHTPAGLTGPPGSPAGSPTSTEEGTSESATPESGPGTSTEPSEGSAPGSPAGSPTSTEEGTSTEPSEGSAPGTSTEPSEGSAPGTSESATPESGPGSEPATSGSETPGSEPATSGSETPGSPAGSPTSTEEGTSESATPESGPGTSTEPSEGSAPGTSTEPSEGSAPGSPAGSPTSTEEGTSTEPSEGSAPGTSTEPSEGSAPGTSESATPESGPGTSTEPSEGSAPGTSESATPESGPGSEPATSGSETPGTSTEPSEGSAPGTSTEPSEGSAPGTSESATPESGPGTSESATPEGAAEPEA

SEQ ID NO: 1041 - protein, 1020 aa, Artificial Sequence
  Description of Artificial Sequence: Synthetic polypeptide
HHHHHHGSPAGSPTSTEEGTSESATPESGPGTSTEPSEGSAPGSPAGSPTSTEEGTSTEPSEGSAPGTSTEPSEGSAPGTSESATPESGPGSEPATSGSETPGSEPATSGSETPGSPAGSPTSTEEGTSESATPESGPGTSTEPSEGSAPEAGRSANHTPAGLTGPATSGSETPGTDIQMTQSPSSLSASVGDRVTITCQASQDISNYLNWYQQKPGKAPKLLIYDASNLETGVPSRFSGSGSGTDFTFTISRLQPEDTATYFCQHFDHLPLAFGGGTKVEIKGATPPETGAETESPGETTGGSAESEPPGEGQVQLQESGPGAVKPSETLSLTCTVSGGSVSSGDYYWTWIRQSPGKGLEWIGHIYYSGNTNYNPSLKSRLTISIDTSKTQFSLKLSSVTAADTATYYCVRDRVTGAFDIWGQGTAVTVSSGGGGSELVVTQEPSLTVSPGGTVTLTCRSSNGAVTSSNYANWVQQKPGQAPRGLIGGTNKRAPGTPARFSGSLLGGSAALTLSGVQPEDEAVYYCALWYPNLWVFGGGTKLTVLGATPPETGAETESPGETTGGSAESEPPGEGEVQLQESGGGIVQPGGSLKLSCAASGFTFNTYAMNWVRQAPGKGLEWVARIRSKYNNYATYYADSVKDRFTISRDDSKNTVYLQMNNLKTEDTAVYYCVRHENFGNSYVSWFAHWGQGTLVTVSSGTAEAASASGEAGRSANHTPAGLTGPPGSPAGSPTSTEEGTSESATPESGPGTSTEPSEGSAPGSPAGSPTSTEEGTSTEPSEGSAPGTSTEPSEGSAPGTSESATPESGPGSEPATSGSETPGSEPATSGSETPGSPAGSPTSTEEGTSESATPESGPGTSTEPSEGSAPGTSTEPSEGSAPGSPAGSPTSTEEGTSTEPSEGSAPGTSTEPSEGSAPGTSESATPESGPGTSTEPSEGSAPGTSESATPESGPGSEPATSGSETPGTSTEPSEGSAPGTSTEPSEGSAPGTSESATPESGPGTSESATPEGAAEPEA

SEQ ID NO: 1042 - protein, 1020 aa, Artificial Sequence
  Description of Artificial Sequence: Synthetic polypeptide
HHHHHHGSPAGSPTSTEEGTSESATPESGPGTSTEPSEGSAPGSPAGSPTSTEEGTSTEPSEGSAPGTSTEPSEGSAPGTSESATPESGPGSEPATSGSETPGSEPATSGSETPGSPAGSPTSTEEGTSESATPESGPGTSTEPSEGSAPEAGRSANHTPAGLTGPATSGSETPGTDIQMTQSPSSLSASVGDRVTITCQASQDISNYLNWYQQKPGKAPKLLIYDASNLETGVPSRFSGSGSGTDFTFTISRLQPEDTATYFCQHFDHLPLAFGGGTKVEIKGATPPETGAETESPGETTGGSAESEPPGEGQVQLQESGPGAVKPSETLSLTCTVSGGSVSSGDYYWTWIRQSPGKGLEWIGHIYYSGNTNYNPSLKSRLTISIDTSKTQFSLKLSSVTAADTATYYCVRDRVTGAFDIWGQGTAVTVSSGGGGSELVVTQEPSLTVSPGGTVTLTCRSSNGAVTSSNYANWVQQKPGQAPRGLIGGTNKRAPGTPARFSGSSLGGSAALTLSGVQPEDEAVYYCALWYPNLWVFGGGTKLTVLGATPPETGAETESPGETTGGSAESEPPGEGEVQLQESGGGIVQPGGSLKLSCAASGFTFNTYAMNWVRQAPGKGLEWVARIRSKYNNYATYYADSVKDRFTISRDDSKNTVYLQMNNLKTEDTAVYYCVRHENFGNSYVSWFAHWGQGTLVTVSSGTAEAASASGEAGRSANHTPAGLTGPPGSPAGSPTSTEEGTSESATPESGPGTSTEPSEGSAPGSPAGSPTSTEEGTSTEPSEGSAPGTSTEPSEGSAPGTSESATPESGPGSEPATSGSETPGSEPATSGSETPGSPAGSPTSTEEGTSESATPESGPGTSTEPSEGSAPGTSTEPSEGSAPGSPAGSPTSTEEGTSTEPSEGSAPGTSTEPSEGSAPGTSESATPESGPGTSTEPSEGSAPGTSESATPESGPGSEPATSGSETPGTSTEPSEGSAPGTSTEPSEGSAPGTSESATPESGPGTSESATPEGAAEPEA

SEQ ID NO: 1043 - protein, 1020 aa, Artificial Sequence
  Description of Artificial Sequence: Synthetic polypeptide
HHHHHHGSPAGSPTSTEEGTSESATPESGPGTSTEPSEGSAPGSPAGSPTSTEEGTSTEPSEGSAPGTSTEPSEGSAPGTSESATPESGPGSEPATSGSETPGSEPATSGSETPGSPAGSPTSTEEGTSESATPESGPGTSTEPSEGSAPEAGRSANHTPAGLTGPATSGSETPGTDIQMTQSPSSLSASVGDRVTITCQASQDISNYLNWYQQKPGKAPKLLIYDASNLETGVPSRFSGSGSGTDFTFTISRLQPEDTATYFCQHFDHLPLAFGGGTKVEIKGATPPETGAETESPGETTGGSAESEPPGEGQVQLQESGPGAVKPSETLSLTCTVSGGSVSSGDYYWTWIRQSPGKGLEWIGHIYYSGNTNYNPSLKSRLTISIDTSKTQFSLKLSSVTAADTATYYCVRDRVTGAFDIWGQGTAVTVSSGGGGSELVVTQEPSLTVSPGGTVTLTCRSSTGAVTTSNYANWVQQKPGQAPRGLIGGTNKRAPGTPARFSGSSLGGSAALTLSGVQPEDEAEYYCALWYSNLWVFGGGTKLTVLGATPPETGAETESPGETTGGSAESEPPGEGEVQLQESGGGLVQPGGSLKLSCAASGFTFNTYAMNWVRQAPGKGLEWVARIRSKYNNYATYYADSVKDRFTISRDDSKNTAYLQMNNLKTEDTAVYYCVRHGNFGNSYVSWFAYWGQGTLVTVSSGTAEAASASGEAGRSANHTPAGLTGPPGSPAGSPTSTEEGTSESATPESGPGTSTEPSEGSAPGSPAGSPTSTEEGTSTEPSEGSAPGTSTEPSEGSAPGTSESATPESGPGSEPATSGSETPGSEPATSGSETPGSPAGSPTSTEEGTSESATPESGPGTSTEPSEGSAPGTSTEPSEGSAPGSPAGSPTSTEEGTSTEPSEGSAPGTSTEPSEGSAPGTSESATPESGPGTSTEPSEGSAPGTSESATPESGPGSEPATSGSETPGTSTEPSEGSAPGTSTEPSEGSAPGTSESATPESGPGTSESATPEGAAEPEA

SEQ ID NO: 1044 - protein, 1175 aa, Artificial Sequence
  Description of Artificial Sequence: Synthetic polypeptide
HHHHHHSPAGSPTSTEEGTSESATPESGPGTSTEPSEGSAPGTSESATPESGPGSEPATSGSETPGTSESATPESGPGSEPATSGSETPGTSESATPESGPGTSTEPSEGSAPGSPAGSPTSTEEGTSESATPESGPGSEPATSGSETPGTSESATPESGPGSPAGSPTSTEEGSPAGSPTSTEEGTSTEPSEGSAPGTSESATPESGPGTSESATPESGPGTSESATPESGPGSEPATSGSETPGSEPATSGSETPGSPAGSPTSTEEGTSTEPSEGSAPGTSTEPSEGSAPGGSAPEAGRSANHTPAGLTGPATSGSETPGTDIQMTQSPSSLSASVGDRVTITCQASQDISNYLNWYQQKPGKAPKLLIYDASNLETGVPSRFSGSGSGTDFTFTISSLQPEDIATYFCQHFDHLPLAFGGGTKVEIKGATPPETGAETESPGETTGGSAESEPPGEGQVQLQESGPGLVKPSETLSLTCTVSGGSVSSGDYYWTWIRQSPGKGLEWIGHIYYSGNTNYNPSLKSRLTISIDTSKTQFSLKLSSVTAADTAIYYCVRDRVTGAFDIWGQGTMVTVSSGGGGSELVVTQEPSLTVSPGGTVTLTCRSSNGAVTSSNYANWVQQKPGQAPRGLIGGTNKRAPGTPARFSGSLLGGKAALTLSGVQPEDEAVYYCALWYPNLWVFGGGTKLTVLGATPPETGAETESPGETTGGSAESEPPGEGEVQLLESGGGIVQPGGSLKLSCAASGFTFNTYAMNWVRQAPGKGLEWVARIRSKYNNYATYYADSVKDRFTISRDDSKNTVYLQMNNLKTEDTAVYYCVRHENFGNSYVSWFAHWGQGTLVTVSSGTAEAASASGEAGRSANHTPAGLTGPPGSPAGSPTSTEEGTSESATPESGPGTSTEPSEGSAPGSPAGSPTSTEEGTSTEPSEGSAPGTSTEPSEGSAPGTSESATPESGPGSEPATSGSETPGSEPATSGSETPGSPAGSPTSTEEGTSESATPESGPGTSTEPSEGSAPGTSTEPSEGSAPGSPAGSPTSTEEGTSTEPSEGSAPGTSTEPSEGSAPGTSESATPESGPGTSTEPSEGSAPGTSESATPESGPGSEPATSGSETPGTSTEPSEGSAPGTSTEPSEGSAPGTSESATPESGPGTSESATPESGPGSPAGAAEPEA

SEQ ID NO: 1045 - protein, 1175 aa, Artificial Sequence
  Description of Artificial Sequence: Synthetic polypeptide
HHHHHHSPAGSPTSTEEGTSESATPESGPGTSTEPSEGSAPGTSESATPESGPGSEPATSGSETPGTSESATPESGPGSEPATSGSETPGTSESATPESGPGTSTEPSEGSAPGSPAGSPTSTEEGTSESATPESGPGSEPATSGSETPGTSESATPESGPGSPAGSPTSTEEGSPAGSPTSTEEGTSTEPSEGSAPGTSESATPESGPGTSESATPESGPGTSESATPESGPGSEPATSGSETPGSEPATSGSETPGSPAGSPTSTEEGTSTEPSEGSAPGTSTEPSEGSAPGGSAPEAGRSANHTPAGLTGPATSGSETPGTDIQMTQSPSSLSASVGDRVTITCQASQDISNYLNWYQQKPGKAPKLLIYDASNLETGVPSRFSGSGSGTDFTFTISSLQPEDIATYFCQHFDHLPLAFGGGTKVEIKGATPPETGAETESPGETTGGSAESEPPGEGQVQLQESGPGLVKPSETLSLTCTVSGGSVSSGDYYWTWIRQSPGKGLEWIGHIYYSGNTNYNPSLKSRLTISIDTSKTQFSLKLSSVTAADTAIYYCVRDRVTGAFDIWGQGTMVTVSSGGGGSELVVTQEPSLTVSPGGTVTLTCRSSNGEVTTSNYANWVQQKPGQAPRGLIGGTIKRAPGTPARFSGSLLGGKAALTLSGVQPEDEAVYYCALWYPNLWVFGGGTKLTVLGATPPETGAETESPGETTGGSAESEPPGEGEVQLLESGGGIVQPGGSLKLSCAASGFTFNTYAMNWVRQAPGKGLEWVARIRSKYNNYATYYADSVKDRFTISRDDSKNTVYLQMNNLKTEDTAVYYCVRHENFGNSYVSWFAHWGQGTLVTVSSGTAEAASASGEAGRSANHTPAGLTGPPGSPAGSPTSTEEGTSESATPESGPGTSTEPSEGSAPGSPAGSPTSTEEGTSTEPSEGSAPGTSTEPSEGSAPGTSESATPESGPGSEPATSGSETPGSEPATSGSETPGSPAGSPTSTEEGTSESATPESGPGTSTEPSEGSAPGTSTEPSEGSAPGSPAGSPTSTEEGTSTEPSEGSAPGTSTEPSEGSAPGTSESATPESGPGTSTEPSEGSAPGTSESATPESGPGSEPATSGSETPGTSTEPSEGSAPGTSTEPSEGSAPGTSESATPESGPGTSESATPESGPGSPAGAAEPEA

SEQ ID NO: 1046 - protein, 1175 aa, Artificial Sequence
  Description of Artificial Sequence: Synthetic polypeptide
HHHHHHSPAGSPTSTEEGTSESATPESGPGTSTEPSEGSAPGTSESATPESGPGSEPATSGSETPGTSESATPESGPGSEPATSGSETPGTSESATPESGPGTSTEPSEGSAPGSPAGSPTSTEEGTSESATPESGPGSEPATSGSETPGTSESATPESGPGSPAGSPTSTEEGSPAGSPTSTEEGTSTEPSEGSAPGTSESATPESGPGTSESATPESGPGTSESATPESGPGSEPATSGSETPGSEPATSGSETPGSPAGSPTSTEEGTSTEPSEGSAPGTSTEPSEGSAPGGSAPEAGRSANHTPAGLTGPATSGSETPGTDIQMTQSPSSLSASVGDRVTITCQASQDISNYLNWYQQKPGKAPKLLIYDASNLETGVPSRFSGSGSGTDFTFTISSLQPEDIATYFCQHFDHLPLAFGGGTKVEIKGATPPETGAETESPGETTGGSAESEPPGEGQVQLQESGPGLVKPSETLSLTCTVSGGSVSSGDYYWTWIRQSPGKGLEWIGHIYYSGNTNYNPSLKSRLTISIDTSKTQFSLKLSSVTAADTAIYYCVRDRVTGAFDIWGQGTMVTVSSGGGGSELVVTQEPSHTVSPGGTVTLTCRSSTGAVTSSNYANWVQQKPGQAPRGLIGGTIKRAPGTPARFSGSLLGGKAALTLSGVQPEDEAEYYCALWYPNLWVFGGGTKLTVLGATPPETGAETESPGETTGGSAESEPPGEGEVQLLESGGGIVQPGGSLKLSCAASGFTFNTYAMNWVRQAPGKGLEWVARIRSKYNNYATYYADSVKDRFTISRDDSKNTVYLQMNNLKTEDTAVYYCVRHENFGNSYVSWFAHWGQGTLVTVSSGTAEAASASGEAGRSANHTPAGLTGPPGSPAGSPTSTEEGTSESATPESGPGTSTEPSEGSAPGSPAGSPTSTEEGTSTEPSEGSAPGTSTEPSEGSAPGTSESATPESGPGSEPATSGSETPGSEPATSGSETPGSPAGSPTSTEEGTSESATPESGPGTSTEPSEGSAPGTSTEPSEGSAPGSPAGSPTSTEEGTSTEPSEGSAPGTSTEPSEGSAPGTSESATPESGPGTSTEPSEGSAPGTSESATPESGPGSEPATSGSETPGTSTEPSEGSAPGTSTEPSEGSAPGTSESATPESGPGTSESATPESGPGSPAGAAEPEA

SEQ ID NO: 1047 - protein, 1175 aa, Artificial Sequence
  Description of Artificial Sequence: Synthetic polypeptide
HHHHHHSPAGSPTSTEEGTSESATPESGPGTSTEPSEGSAPGTSESATPESGPGSEPATSGSETPGTSESATPESGPGSEPATSGSETPGTSESATPESGPGTSTEPSEGSAPGSPAGSPTSTEEGTSESATPESGPGSEPATSGSETPGTSESATPESGPGSPAGSPTSTEEGSPAGSPTSTEEGTSTEPSEGSAPGTSESATPESGPGTSESATPESGPGTSESATPESGPGSEPATSGSETPGSEPATSGSETPGSPAGSPTSTEEGTSTEPSEGSAPGTSTEPSEGSAPGGSAPEAGRSANHTPAGLTGPATSGSETPGTDIQMTQSPSSLSASVGDRVTITCQASQDISNYLNWYQQKPGKAPKLLIYDASNLETGVPSRFSGSGSGTDFTFTISSLQPEDIATYFCQHFDHLPLAFGGGTKVEIKGATPPETGAETESPGETTGGSAESEPPGEGQVQLQESGPGLVKPSETLSLTCTVSGGSVSSGDYYWTWIRQSPGKGLEWIGHIYYSGNTNYNPSLKSRLTISIDTSKTQFSLKLSSVTAADTAIYYCVRDRVTGAFDIWGQGTMVTVSSGGGGSELVVTQEPSHTVSPGGTVTLTCRSSTGEVTTSNYANWVQQKPGQAPRGLIGGTIKRAPGTPARFSGSLLGGKAALTLSGVQPEDEAEYYCALWYPNLWVFGGGTKLTVLGATPPETGAETESPGETTGGSAESEPPGEGEVQLLESGGGIVQPGGSLKLSCAASGFTFNTYAMNWVRQAPGKGLEWVARIRSKYNNYATYYADSVKDRFTISRDDSKNTVYLQMNNLKTEDTAVYYCVRHENFGNSYVSWFAHWGQGTLVTVSSGTAEAASASGEAGRSANHTPAGLTGPPGSPAGSPTSTEEGTSESATPESGPGTSTEPSEGSAPGSPAGSPTSTEEGTSTEPSEGSAPGTSTEPSEGSAPGTSESATPESGPGSEPATSGSETPGSEPATSGSETPGSPAGSPTSTEEGTSESATPESGPGTSTEPSEGSAPGTSTEPSEGSAPGSPAGSPTSTEEGTSTEPSEGSAPGTSTEPSEGSAPGTSESATPESGPGTSTEPSEGSAPGTSESATPESGPGSEPATSGSETPGTSTEPSEGSAPGTSTEPSEGSAPGTSESATPESGPGTSESATPESGPGSPAGAAEPEA

SEQ ID NO: 1048 - protein, 1175 aa, Artificial Sequence
  Description of Artificial Sequence: Synthetic polypeptide
HHHHHHSPAGSPTSTEEGTSESATPESGPGTSTEPSEGSAPGTSESATPESGPGSEPATSGSETPGTSESATPESGPGSEPATSGSETPGTSESATPESGPGTSTEPSEGSAPGSPAGSPTSTEEGTSESATPESGPGSEPATSGSETPGTSESATPESGPGSPAGSPTSTEEGSPAGSPTSTEEGTSTEPSEGSAPGTSESATPESGPGTSESATPESGPGTSESATPESGPGSEPATSGSETPGSEPATSGSETPGSPAGSPTSTEEGTSTEPSEGSAPGTSTEPSEGSAPGGSAPEAGRSANHTPAGLTGPATSGSETPGTDIQMTQSPSSLSASVGDRVTITCQASQDISNYLNWYQQKPGKAPKLLIYDASNLETGVPSRFSGSGSGTDFTFTISSLQPEDIATYFCQHFDHLPLAFGGGTKVEIKGATPPETGAETESPGETTGGSAESEPPGEGQVQLQESGPGLVKPSETLSLTCTVSGGSVSSGDYYWTWIRQSPGKGLEWIGHIYYSGNTNYNPSLKSRLTISIDTSKTQFSLKLSSVTAADTAIYYCVRDRVTGAFDIWGQGTMVTVSSGGGGSELVVTQEPSLTVSPGGTVTLTCRSSNGAVTSSNYANWVQQKPGQAPRGLIGGTNKRAPGTPARFSGSSLGGKAALTLSGVQPEDEAVYYCALWYPNLWVFGGGTKLTVLGATPPETGAETESPGETTGGSAESEPPGEGEVQLQESGGGIVQPGGSLKLSCAASGFTFNTYAMNWVRQAPGKGLEWVARIRSKYNNYATYYADSVKDRFTISRDDSKNTVYLQMNNLKTEDTAVYYCVRHENFGNSYVSWFAHWGQGTLVTVSSGTAEAASASGEAGRSANHTPAGLTGPPGSPAGSPTSTEEGTSESATPESGPGTSTEPSEGSAPGSPAGSPTSTEEGTSTEPSEGSAPGTSTEPSEGSAPGTSESATPESGPGSEPATSGSETPGSEPATSGSETPGSPAGSPTSTEEGTSESATPESGPGTSTEPSEGSAPGTSTEPSEGSAPGSPAGSPTSTEEGTSTEPSEGSAPGTSTEPSEGSAPGTSESATPESGPGTSTEPSEGSAPGTSESATPESGPGSEPATSGSETPGTSTEPSEGSAPGTSTEPSEGSAPGTSESATPESGPGTSESATPESGPGSPAGAAEPEA

SEQ ID NO: 1049 - protein, 1175 aa, Artificial Sequence
  Description of Artificial Sequence: Synthetic polypeptide
HHHHHHSPAGSPTSTEEGTSESATPESGPGTSTEPSEGSAPGTSESATPESGPGSEPATSGSETPGTSESATPESGPGSEPATSGSETPGTSESATPESGPGTSTEPSEGSAPGSPAGSPTSTEEGTSESATPESGPGSEPATSGSETPGTSESATPESGPGSPAGSPTSTEEGSPAGSPTSTEEGTSTEPSEGSAPGTSESATPESGPGTSESATPESGPGTSESATPESGPGSEPATSGSETPGSEPATSGSETPGSPAGSPTSTEEGTSTEPSEGSAPGTSTEPSEGSAPGGSAPEAGRSANHTPAGLTGPATSGSETPGTDIQMTQSPSSLSASVGDRVTITCQASQDISNYLNWYQQKPGKAPKLLIYDASNLETGVPSRFSGSGSGTDFTFTISSLQPEDIATYFCQHFDHLPLAFGGGTKVEIKGATPPETGAETESPGETTGGSAESEPPGEGQVQLQESGPGLVKPSETLSLTCTVSGGSVSSGDYYWTWIRQSPGKGLEWIGHIYYSGNTNYNPSLKSRLTISIDTSKTQFSLKLSSVTAADTAIYYCVRDRVTGAFDIWGQGTMVTVSSGGGGSELVVTQEPSLTVSPGGTVTLTCRSSNGAVTSSNYANWVQQKPGQAPRGLIGGTNKRAPGTPARFSGSLLGGSAALTLSGVQPEDEAVYYCALWYPNLWVFGGGTKLTVLGATPPETGAETESPGETTGGSAESEPPGEGEVQLQESGGGIVQPGGSLKLSCAASGFTFNTYAMNWVRQAPGKGLEWVARIRSKYNNYATYYADSVKDRFTISRDDSKNTVYLQMNNLKTEDTAVYYCVRHENFGNSYVSWFAHWGQGTLVTVSSGTAEAASASGEAGRSANHTPAGLTGPPGSPAGSPTSTEEGTSESATPESGPGTSTEPSEGSAPGSPAGSPTSTEEGTSTEPSEGSAPGTSTEPSEGSAPGTSESATPESGPGSEPATSGSETPGSEPATSGSETPGSPAGSPTSTEEGTSESATPESGPGTSTEPSEGSAPGTSTEPSEGSAPGSPAGSPTSTEEGTSTEPSEGSAPGTSTEPSEGSAPGTSESATPESGPGTSTEPSEGSAPGTSESATPESGPGSEPATSGSETPGTSTEPSEGSAPGTSTEPSEGSAPGTSESATPESGPGTSESATPESGPGSPAGAAEPEA

SEQ ID NO: 1050 - protein, 1175 aa, Artificial Sequence
  Description of Artificial Sequence: Synthetic polypeptide
HHHHHHSPAGSPTSTEEGTSESATPESGPGTSTEPSEGSAPGTSESATPESGPGSEPATSGSETPGTSESATPESGPGSEPATSGSETPGTSESATPESGPGTSTEPSEGSAPGSPAGSPTSTEEGTSESATPESGPGSEPATSGSETPGTSESATPESGPGSPAGSPTSTEEGSPAGSPTSTEEGTSTEPSEGSAPGTSESATPESGPGTSESATPESGPGTSESATPESGPGSEPATSGSETPGSEPATSGSETPGSPAGSPTSTEEGTSTEPSEGSAPGTSTEPSEGSAPGGSAPEAGRSANHTPAGLTGPATSGSETPGTDIQMTQSPSSLSASVGDRVTITCQASQDISNYLNWYQQKPGKAPKLLIYDASNLETGVPSRFSGSGSGTDFTFTISSLQPEDIATYFCQHFDHLPLAFGGGTKVEIKGATPPETGAETESPGETTGGSAESEPPGEGQVQLQESGPGLVKPSETLSLTCTVSGGSVSSGDYYWTWIRQSPGKGLEWIGHIYYSGNTNYNPSLKSRLTISIDTSKTQFSLKLSSVTAADTAIYYCVRDRVTGAFDIWGQGTMVTVSSGGGGSELVVTQEPSLTVSPGGTVTLTCRSSNGAVTSSNYANWVQQKPGQAPRGLIGGTNKRAPGTPARFSGSSLGGSAALTLSGVQPEDEAVYYCALWYPNLWVFGGGTKLTVLGATPPETGAETESPGETTGGSAESEPPGEGEVQLQESGGGIVQPGGSLKLSCAASGFTFNTYAMNWVRQAPGKGLEWVARIRSKYNNYATYYADSVKDRFTISRDDSKNTVYLQMNNLKTEDTAVYYCVRHENFGNSYVSWFAHWGQGTLVTVSSGTAEAASASGEAGRSANHTPAGLTGPPGSPAGSPTSTEEGTSESATPESGPGTSTEPSEGSAPGSPAGSPTSTEEGTSTEPSEGSAPGTSTEPSEGSAPGTSESATPESGPGSEPATSGSETPGSEPATSGSETPGSPAGSPTSTEEGTSESATPESGPGTSTEPSEGSAPGTSTEPSEGSAPGSPAGSPTSTEEGTSTEPSEGSAPGTSTEPSEGSAPGTSESATPESGPGTSTEPSEGSAPGTSESATPESGPGSEPATSGSETPGTSTEPSEGSAPGTSTEPSEGSAPGTSESATPESGPGTSESATPESGPGSPAGAAEPEA

SEQ ID NO: 1051 - protein, 1175 aa, Artificial Sequence
  Description of Artificial Sequence: Synthetic polypeptide
HHHHHHSPAGSPTSTEEGTSESATPESGPGTSTEPSEGSAPGTSESATPESGPGSEPATSGSETPGTSESATPESGPGSEPATSGSETPGTSESATPESGPGTSTEPSEGSAPGSPAGSPTSTEEGTSESATPESGPGSEPATSGSETPGTSESATPESGPGSPAGSPTSTEEGSPAGSPTSTEEGTSTEPSEGSAPGTSESATPESGPGTSESATPESGPGTSESATPESGPGSEPATSGSETPGSEPATSGSETPGSPAGSPTSTEEGTSTEPSEGSAPGTSTEPSEGSAPGGSAPEAGRSANHTPAGLTGPATSGSETPGTDIQMTQSPSSLSASVGDRVTITCQASQDISNYLNWYQQKPGKAPKLLIYDASNLETGVPSRFSGSGSGTDFTFTISSLQPEDIATYFCQHFDHLPLAFGGGTKVEIKGATPPETGAETESPGETTGGSAESEPPGEGQVQLQESGPGLVKPSETLSLTCTVSGGSVSSGDYYWTWIRQSPGKGLEWIGHIYYSGNTNYNPSLKSRLTISIDTSKTQFSLKLSSVTAADTAIYYCVRDRVTGAFDIWGQGTMVTVSSGGGGSELVVTQEPSLTVSPGGTVTLTCRSSTGAVTTSNYANWVQQKPGQAPRGLIGGTNKRAPGTPARFSGSSLGGSAALTLSGVQPEDEAEYYCALWYSNLWVFGGGTKLTVLGATPPETGAETESPGETTGGSAESEPPGEGEVQLQESGGGLVQPGGSLKLSCAASGFTFNTYAMNWVRQAPGKGLEWVARIRSKYNNYATYYADSVKDRFTISRDDSKNTAYLQMNNLKTEDTAVYYCVRHGNFGNSYVSWFAYWGQGTLVTVSSGTAEAASASGEAGRSANHTPAGLTGPPGSPAGSPTSTEEGTSESATPESGPGTSTEPSEGSAPGSPAGSPTSTEEGTSTEPSEGSAPGTSTEPSEGSAPGTSESATPESGPGSEPATSGSETPGSEPATSGSETPGSPAGSPTSTEEGTSESATPESGPGTSTEPSEGSAPGTSTEPSEGSAPGSPAGSPTSTEEGTSTEPSEGSAPGTSTEPSEGSAPGTSESATPESGPGTSTEPSEGSAPGTSESATPESGPGSEPATSGSETPGTSTEPSEGSAPGTSTEPSEGSAPGTSESATPESGPGTSESATPESGPGSPAGAAEPEA

SEQ ID NO: 1052 - protein, 1175 aa, Artificial Sequence
  Description of Artificial Sequence: Synthetic polypeptide
HHHHHHSPAGSPTSTEEGTSESATPESGPGTSTEPSEGSAPGTSESATPESGPGSEPATSGSETPGTSESATPESGPGSEPATSGSETPGTSESATPESGPGTSTEPSEGSAPGSPAGSPTSTEEGTSESATPESGPGSEPATSGSETPGTSESATPESGPGSPAGSPTSTEEGSPAGSPTSTEEGTSTEPSEGSAPGTSESATPESGPGTSESATPESGPGTSESATPESGPGSEPATSGSETPGSEPATSGSETPGSPAGSPTSTEEGTSTEPSEGSAPGTSTEPSEGSAPGGSAPEAGRSANHTPAGLTGPATSGSETPGTDIQMTQSPSSLSASVGDRVTITCQASQDISNYLNWYQQKPGKAPKLLIYDASNLETGVPSRFSGSGSGTDFTFTISRLQPEDTATYFCQHFDHLPLAFGGGTKVEIKGATPPETGAETESPGETTGGSAESEPPGEGQVQLQESGPGAVKPSETLSLTCTVSGGSVSSGDYYWTWIRQSPGKGLEWIGHIYYSGNTNYNPSLKSRLTISIDTSKTQFSLKLSSVTAADTATYYCVRDRVTGAFDIWGQGTAVTVSSGGGGSELVVTQEPSLTVSPGGTVTLTCRSSNGAVTSSNYANWVQQKPGQAPRGLIGGTNKRAPGTPARFSGSLLGGKAALTLSGVQPEDEAVYYCALWYPNLWVFGGGTKLTVLGATPPETGAETESPGETTGGSAESEPPGEGEVQLLESGGGIVQPGGSLKLSCAASGFTFNTYAMNWVRQAPGKGLEWVARIRSKYNNYATYYADSVKDRFTISRDDSKNTVYLQMNNLKTEDTAVYYCVRHENFGNSYVSWFAHWGQGTLVTVSSGTAEAASASGEAGRSANHTPAGLTGPPGSPAGSPTSTEEGTSESATPESGPGTSTEPSEGSAPGSPAGSPTSTEEGTSTEPSEGSAPGTSTEPSEGSAPGTSESATPESGPGSEPATSGSETPGSEPATSGSETPGSPAGSPTSTEEGTSESATPESGPGTSTEPSEGSAPGTSTEPSEGSAPGSPAGSPTSTEEGTSTEPSEGSAPGTSTEPSEGSAPGTSESATPESGPGTSTEPSEGSAPGTSESATPESGPGSEPATSGSETPGTSTEPSEGSAPGTSTEPSEGSAPGTSESATPESGPGTSESATPESGPGSPAGAAEPEA

SEQ ID NO: 1053 - protein, 1175 aa, Artificial Sequence
  Description of Artificial Sequence: Synthetic polypeptide
HHHHHHSPAGSPTSTEEGTSESATPESGPGTSTEPSEGSAPGTSESATPESGPGSEPATSGSETPGTSESATPESGPGSEPATSGSETPGTSESATPESGPGTSTEPSEGSAPGSPAGSPTSTEEGTSESATPESGPGSEPATSGSETPGTSESATPESGPGSPAGSPTSTEEGSPAGSPTSTEEGTSTEPSEGSAPGTSESATPESGPGTSESATPESGPGTSESATPESGPGSEPATSGSETPGSEPATSGSETPGSPAGSPTSTEEGTSTEPSEGSAPGTSTEPSEGSAPGGSAPEAGRSANHTPAGLTGPATSGSETPGTDIQMTQSPSSLSASVGDRVTITCQASQDISNYLNWYQQKPGKAPKLLIYDASNLETGVPSRFSGSGSGTDFTFTISRLQPEDTATYFCQHFDHLPLAFGGGTKVEIKGATPPETGAETESPGETTGGSAESEPPGEGQVQLQESGPGAVKPSETLSLTCTVSGGSVSSGDYYWTWIRQSPGKGLEWIGHIYYSGNTNYNPSLKSRLTISIDTSKTQFSLKLSSVTAADTATYYCVRDRVTGAFDIWGQGTAVTVSSGGGGSELVVTQEPSLTVSPGGTVTLTCRSSNGEVTTSNYANWVQQKPGQAPRGLIGGTIKRAPGTPARFSGSLLGGKAALTLSGVQPEDEAVYYCALWYPNLWVFGGGTKLTVLGATPPETGAETESPGETTGGSAESEPPGEGEVQLLESGGGIVQPGGSLKLSCAASGFTFNTYAMNWVRQAPGKGLEWVARIRSKYNNYATYYADSVKDRFTISRDDSKNTVYLQMNNLKTEDTAVYYCVRHENFGNSYVSWFAHWGQGTLVTVSSGTAEAASASGEAGRSANHTPAGLTGPPGSPAGSPTSTEEGTSESATPESGPGTSTEPSEGSAPGSPAGSPTSTEEGTSTEPSEGSAPGTSTEPSEGSAPGTSESATPESGPGSEPATSGSETPGSEPATSGSETPGSPAGSPTSTEEGTSESATPESGPGTSTEPSEGSAPGTSTEPSEGSAPGSPAGSPTSTEEGTSTEPSEGSAPGTSTEPSEGSAPGTSESATPESGPGTSTEPSEGSAPGTSESATPESGPGSEPATSGSETPGTSTEPSEGSAPGTSTEPSEGSAPGTSESATPESGPGTSESATPESGPGSPAGAAEPEA

SEQ ID NO: 1054 - protein, 1175 aa, Artificial Sequence
  Description of Artificial Sequence: Synthetic polypeptide
HHHHHHSPAGSPTSTEEGTSESATPESGPGTSTEPSEGSAPGTSESATPESGPGSEPATSGSETPGTSESATPESGPGSEPATSGSETPGTSESATPESGPGTSTEPSEGSAPGSPAGSPTSTEEGTSESATPESGPGSEPATSGSETPGTSESATPESGPGSPAGSPTSTEEGSPAGSPTSTEEGTSTEPSEGSAPGTSESATPESGPGTSESATPESGPGTSESATPESGPGSEPATSGSETPGSEPATSGSETPGSPAGSPTSTEEGTSTEPSEGSAPGTSTEPSEGSAPGGSAPEAGRSANHTPAGLTGPATSGSETPGTDIQMTQSPSSLSASVGDRVTITCQASQDISNYLNWYQQKPGKAPKLLIYDASNLETGVPSRFSGSGSGTDFTFTISRLQPEDTATYFCQHFDHLPLAFGGGTKVEIKGATPPETGAETESPGETTGGSAESEPPGEGQVQLQESGPGAVKPSETLSLTCTVSGGSVSSGDYYWTWIRQSPGKGLEWIGHIYYSGNTNYNPSLKSRLTISIDTSKTQFSLKLSSVTAADTATYYCVRDRVTGAFDIWGQGTAVTVSSGGGGSELVVTQEPSHTVSPGGTVTLTCRSSTGAVTSSNYANWVQQKPGQAPRGLIGGTIKRAPGTPARFSGSLLGGKAALTLSGVQPEDEAEYYCALWYPNLWVFGGGTKLTVLGATPPETGAETESPGETTGGSAESEPPGEGEVQLLESGGGIVQPGGSLKLSCAASGFTFNTYAMNWVRQAPGKGLEWVARIRSKYNNYATYYADSVKDRFTISRDDSKNTVYLQMNNLKTEDTAVYYCVRHENFGNSYVSWFAHWGQGTLVTVSSGTAEAASASGEAGRSANHTPAGLTGPPGSPAGSPTSTEEGTSESATPESGPGTSTEPSEGSAPGSPAGSPTSTEEGTSTEPSEGSAPGTSTEPSEGSAPGTSESATPESGPGSEPATSGSETPGSEPATSGSETPGSPAGSPTSTEEGTSESATPESGPGTSTEPSEGSAPGTSTEPSEGSAPGSPAGSPTSTEEGTSTEPSEGSAPGTSTEPSEGSAPGTSESATPESGPGTSTEPSEGSAPGTSESATPESGPGSEPATSGSETPGTSTEPSEGSAPGTSTEPSEGSAPGTSESATPESGPGTSESATPESGPGSPAGAAEPEA

SEQ ID NO: 1055 - protein, 1175 aa, Artificial Sequence
  Description of Artificial Sequence: Synthetic polypeptide
HHHHHHSPAGSPTSTEEGTSESATPESGPGTSTEPSEGSAPGTSESATPESGPGSEPATSGSETPGTSESATPESGPGSEPATSGSETPGTSESATPESGPGTSTEPSEGSAPGSPAGSPTSTEEGTSESATPESGPGSEPATSGSETPGTSESATPESGPGSPAGSPTSTEEGSPAGSPTSTEEGTSTEPSEGSAPGTSESATPESGPGTSESATPESGPGTSESATPESGPGSEPATSGSETPGSEPATSGSETPGSPAGSPTSTEEGTSTEPSEGSAPGTSTEPSEGSAPGGSAPEAGRSANHTPAGLTGPATSGSETPGTDIQMTQSPSSLSASVGDRVTITCQASQDISNYLNWYQQKPGKAPKLLIYDASNLETGVPSRFSGSGSGTDFTFTISRLQPEDTATYFCQHFDHLPLAFGGGTKVEIKGATPPETGAETESPGETTGGSAESEPPGEGQVQLQESGPGAVKPSETLSLTCTVSGGSVSSGDYYWTWIRQSPGKGLEWIGHIYYSGNTNYNPSLKSRLTISIDTSKTQFSLKLSSVTAADTATYYCVRDRVTGAFDIWGQGTAVTVSSGGGGSELVVTQEPSHTVSPGGTVTLTCRSSTGEVTTSNYANWVQQKPGQAPRGLIGGTIKRAPGTPARFSGSLLGGKAALTLSGVQPEDEAEYYCALWYPNLWVFGGGTKLTVLGATPPETGAETESPGETTGGSAESEPPGEGEVQLLESGGGIVQPGGSLKLSCAASGFTFNTYAMNWVRQAPGKGLEWVARIRSKYNNYATYYADSVKDRFTISRDDSKNTVYLQMNNLKTEDTAVYYCVRHENFGNSYVSWFAHWGQGTLVTVSSGTAEAASASGEAGRSANHTPAGLTGPPGSPAGSPTSTEEGTSESATPESGPGTSTEPSEGSAPGSPAGSPTSTEEGTSTEPSEGSAPGTSTEPSEGSAPGTSESATPESGPGSEPATSGSETPGSEPATSGSETPGSPAGSPTSTEEGTSESATPESGPGTSTEPSEGSAPGTSTEPSEGSAPGSPAGSPTSTEEGTSTEPSEGSAPGTSTEPSEGSAPGTSESATPESGPGTSTEPSEGSAPGTSESATPESGPGSEPATSGSETPGTSTEPSEGSAPGTSTEPSEGSAPGTSESATPESGPGTSESATPESGPGSPAGAAEPEA

SEQ ID NO: 1056 - protein, 1175 aa, Artificial Sequence
  Description of Artificial Sequence: Synthetic polypeptide
HHHHHHSPAGSPTSTEEGTSESATPESGPGTSTEPSEGSAPGTSESATPESGPGSEPATSGSETPGTSESATPESGPGSEPATSGSETPGTSESATPESGPGTSTEPSEGSAPGSPAGSPTSTEEGTSESATPESGPGSEPATSGSETPGTSESATPESGPGSPAGSPTSTEEGSPAGSPTSTEEGTSTEPSEGSAPGTSESATPESGPGTSESATPESGPGTSESATPESGPGSEPATSGSETPGSEPATSGSETPGSPAGSPTSTEEGTSTEPSEGSAPGTSTEPSEGSAPGGSAPEAGRSANHTPAGLTGPATSGSETPGTDIQMTQSPSSLSASVGDRVTITCQASQDISNYLNWYQQKPGKAPKLLIYDASNLETGVPSRFSGSGSGTDFTFTISRLQPEDTATYFCQHFDHLPLAFGGGTKVEIKGATPPETGAETESPGETTGGSAESEPPGEGQVQLQESGPGAVKPSETLSLTCTVSGGSVSSGDYYWTWIRQSPGKGLEWIGHIYYSGNTNYNPSLKSRLTISIDTSKTQFSLKLSSVTAADTATYYCVRDRVTGAFDIWGQGTAVTVSSGGGGSELVVTQEPSLTVSPGGTVTLTCRSSNGAVTSSNYANWVQQKPGQAPRGLIGGTNKRAPGTPARFSGSSLGGKAALTLSGVQPEDEAVYYCALWYPNLWVFGGGTKLTVLGATPPETGAETESPGETTGGSAESEPPGEGEVQLQESGGGIVQPGGSLKLSCAASGFTFNTYAMNWVRQAPGKGLEWVARIRSKYNNYATYYADSVKDRFTISRDDSKNTVYLQMNNLKTEDTAVYYCVRHENFGNSYVSWFAHWGQGTLVTVSSGTAEAASASGEAGRSANHTPAGLTGPPGSPAGSPTSTEEGTSESATPESGPGTSTEPSEGSAPGSPAGSPTSTEEGTSTEPSEGSAPGTSTEPSEGSAPGTSESATPESGPGSEPATSGSETPGSEPATSGSETPGSPAGSPTSTEEGTSESATPESGPGTSTEPSEGSAPGTSTEPSEGSAPGSPAGSPTSTEEGTSTEPSEGSAPGTSTEPSEGSAPGTSESATPESGPGTSTEPSEGSAPGTSESATPESGPGSEPATSGSETPGTSTEPSEGSAPGTSTEPSEGSAPGTSESATPESGPGTSESATPESGPGSPAGAAEPEA

SEQ ID NO: 1057 - protein, 1175 aa, Artificial Sequence
  Description of Artificial Sequence: Synthetic polypeptide
HHHHHHSPAGSPTSTEEGTSESATPESGPGTSTEPSEGSAPGTSESATPESGPGSEPATSGSETPGTSESATPESGPGSEPATSGSETPGTSESATPESGPGTSTEPSEGSAPGSPAGSPTSTEEGTSESATPESGPGSEPATSGSETPGTSESATPESGPGSPAGSPTSTEEGSPAGSPTSTEEGTSTEPSEGSAPGTSESATPESGPGTSESATPESGPGTSESATPESGPGSEPATSGSETPGSEPATSGSETPGSPAGSPTSTEEGTSTEPSEGSAPGTSTEPSEGSAPGGSAPEAGRSANHTPAGLTGPATSGSETPGTDIQMTQSPSSLSASVGDRVTITCQASQDISNYLNWYQQKPGKAPKLLIYDASNLETGVPSRFSGSGSGTDFTFTISRLQPEDTATYFCQHFDHLPLAFGGGTKVEIKGATPPETGAETESPGETTGGSAESEPPGEGQVQLQESGPGAVKPSETLSLTCTVSGGSVSSGDYYWTWIRQSPGKGLEWIGHIYYSGNTNYNPSLKSRLTISIDTSKTQFSLKLSSVTAADTATYYCVRDRVTGAFDIWGQGTAVTVSSGGGGSELVVTQEPSLTVSPGGTVTLTCRSSNGAVTSSNYANWVQQKPGQAPRGLIGGTNKRAPGTPARFSGSLLGGSAALTLSGVQPEDEAVYYCALWYPNLWVFGGGTKLTVLGATPPETGAETESPGETTGGSAESEPPGEGEVQLQESGGGIVQPGGSLKLSCAASGFTFNTYAMNWVRQAPGKGLEWVARIRSKYNNYATYYADSVKDRFTISRDDSKNTVYLQMNNLKTEDTAVYYCVRHENFGNSYVSWFAHWGQGTLVTVSSGTAEAASASGEAGRSANHTPAGLTGPPGSPAGSPTSTEEGTSESATPESGPGTSTEPSEGSAPGSPAGSPTSTEEGTSTEPSEGSAPGTSTEPSEGSAPGTSESATPESGPGSEPATSGSETPGSEPATSGSETPGSPAGSPTSTEEGTSESATPESGPGTSTEPSEGSAPGTSTEPSEGSAPGSPAGSPTSTEEGTSTEPSEGSAPGTSTEPSEGSAPGTSESATPESGPGTSTEPSEGSAPGTSESATPESGPGSEPATSGSETPGTSTEPSEGSAPGTSTEPSEGSAPGTSESATPESGPGTSESATPESGPGSPAGAAEPEA

SEQ ID NO: 1058 - protein, 1175 aa, Artificial Sequence
  Description of Artificial Sequence: Synthetic polypeptide
HHHHHHSPAGSPTSTEEGTSESATPESGPGTSTEPSEGSAPGTSESATPESGPGSEPATSGSETPGTSESATPESGPGSEPATSGSETPGTSESATPESGPGTSTEPSEGSAPGSPAGSPTSTEEGTSESATPESGPGSEPATSGSETPGTSESATPESGPGSPAGSPTSTEEGSPAGSPTSTEEGTSTEPSEGSAPGTSESATPESGPGTSESATPESGPGTSESATPESGPGSEPATSGSETPGSEPATSGSETPGSPAGSPTSTEEGTSTEPSEGSAPGTSTEPSEGSAPGGSAPEAGRSANHTPAGLTGPATSGSETPGTDIQMTQSPSSLSASVGDRVTITCQASQDISNYLNWYQQKPGKAPKLLIYDASNLETGVPSRFSGSGSGTDFTFTISRLQPEDTATYFCQHFDHLPLAFGGGTKVEIKGATPPETGAETESPGETTGGSAESEPPGEGQVQLQESGPGAVKPSETLSLTCTVSGGSVSSGDYYWTWIRQSPGKGLEWIGHIYYSGNTNYNPSLKSRLTISIDTSKTQFSLKLSSVTAADTATYYCVRDRVTGAFDIWGQGTAVTVSSGGGGSELVVTQEPSLTVSPGGTVTLTCRSSNGAVTSSNYANWVQQKPGQAPRGLIGGTNKRAPGTPARFSGSSLGGSAALTLSGVQPEDEAVYYCALWYPNLWVFGGGTKLTVLGATPPETGAETESPGETTGGSAESEPPGEGEVQLQESGGGIVQPGGSLKLSCAASGFTFNTYAMNWVRQAPGKGLEWVARIRSKYNNYATYYADSVKDRFTISRDDSKNTVYLQMNNLKTEDTAVYYCVRHENFGNSYVSWFAHWGQGTLVTVSSGTAEAASASGEAGRSANHTPAGLTGPPGSPAGSPTSTEEGTSESATPESGPGTSTEPSEGSAPGSPAGSPTSTEEGTSTEPSEGSAPGTSTEPSEGSAPGTSESATPESGPGSEPATSGSETPGSEPATSGSETPGSPAGSPTSTEEGTSESATPESGPGTSTEPSEGSAPGTSTEPSEGSAPGSPAGSPTSTEEGTSTEPSEGSAPGTSTEPSEGSAPGTSESATPESGPGTSTEPSEGSAPGTSESATPESGPGSEPATSGSETPGTSTEPSEGSAPGTSTEPSEGSAPGTSESATPESGPGTSESATPESGPGSPAGAAEPEA

SEQ ID NO: 1059 - protein, 1175 aa, Artificial Sequence
  Description of Artificial Sequence: Synthetic polypeptide
HHHHHHSPAGSPTSTEEGTSESATPESGPGTSTEPSEGSAPGTSESATPESGPGSEPATSGSETPGTSESATPESGPGSEPATSGSETPGTSESATPESGPGTSTEPSEGSAPGSPAGSPTSTEEGTSESATPESGPGSEPATSGSETPGTSESATPESGPGSPAGSPTSTEEGSPAGSPTSTEEGTSTEPSEGSAPGTSESATPESGPGTSESATPESGPGTSESATPESGPGSEPATSGSETPGSEPATSGSETPGSPAGSPTSTEEGTSTEPSEGSAPGTSTEPSEGSAPGGSAPEAGRSANHTPAGLTGPATSGSETPGTDIQMTQSPSSLSASVGDRVTITCQASQDISNYLNWYQQKPGKAPKLLIYDASNLETGVPSRFSGSGSGTDFTFTISRLQPEDTATYFCQHFDHLPLAFGGGTKVEIKGATPPETGAETESPGETTGGSAESEPPGEGQVQLQESGPGAVKPSETLSLTCTVSGGSVSSGDYYWTWIRQSPGKGLEWIGHIYYSGNTNYNPSLKSRLTISIDTSKTQFSLKLSSVTAADTATYYCVRDRVTGAFDIWGQGTAVTVSSGGGGSELVVTQEPSLTVSPGGTVTLTCRSSTGAVTTSNYANWVQQKPGQAPRGLIGGTNKRAPGTPARFSGSSLGGSAALTLSGVQPEDEAEYYCALWYSNLWVFGGGTKLTVLGATPPETGAETESPGETTGGSAESEPPGEGEVQLQESGGGLVQPGGSLKLSCAASGFTFNTYAMNWVRQAPGKGLEWVARIRSKYNNYATYYADSVKDRFTISRDDSKNTAYLQMNNLKTEDTAVYYCVRHGNFGNSYVSWFAYWGQGTLVTVSSGTAEAASASGEAGRSANHTPAGLTGPPGSPAGSPTSTEEGTSESATPESGPGTSTEPSEGSAPGSPAGSPTSTEEGTSTEPSEGSAPGTSTEPSEGSAPGTSESATPESGPGSEPATSGSETPGSEPATSGSETPGSPAGSPTSTEEGTSESATPESGPGTSTEPSEGSAPGTSTEPSEGSAPGSPAGSPTSTEEGTSTEPSEGSAPGTSTEPSEGSAPGTSESATPESGPGTSTEPSEGSAPGTSESATPESGPGSEPATSGSETPGTSTEPSEGSAPGTSTEPSEGSAPGTSESATPESGPGTSESATPESGPGSPAGAAEPEA

SEQ ID NO: 1060 - protein, 1459 aa, Artificial Sequence
  Description of Artificial Sequence: Synthetic polypeptide
HHHHHHSPAGSPTSTEEGTSESATPESGPGTSTEPSEGSAPGTSESATPESGPGSEPATSGSETPGTSESATPESGPGSEPATSGSETPGTSESATPESGPGTSTEPSEGSAPGSPAGSPTSTEEGTSESATPESGPGSEPATSGSETPGTSESATPESGPGSPAGSPTSTEEGSPAGSPTSTEEGTSTEPSEGSAPGTSESATPESGPGTSESATPESGPGTSESATPESGPGSEPATSGSETPGSEPATSGSETPGSPAGSPTSTEEGTSTEPSEGSAPGTSTEPSEGSAPGGSAPEAGRSANHTPAGLTGPATSGSETPGTDIQMTQSPSSLSASVGDRVTITCQASQDISNYLNWYQQKPGKAPKLLIYDASNLETGVPSRFSGSGSGTDFTFTISSLQPEDIATYFCQHFDHLPLAFGGGTKVEIKGATPPETGAETESPGETTGGSAESEPPGEGQVQLQESGPGLVKPSETLSLTCTVSGGSVSSGDYYWTWIRQSPGKGLEWIGHIYYSGNTNYNPSLKSRLTISIDTSKTQFSLKLSSVTAADTAIYYCVRDRVTGAFDIWGQGTMVTVSSGGGGSELVVTQEPSLTVSPGGTVTLTCRSSNGAVTSSNYANWVQQKPGQAPRGLIGGTNKRAPGTPARFSGSLLGGKAALTLSGVQPEDEAVYYCALWYPNLWVFGGGTKLTVLGATPPETGAETESPGETTGGSAESEPPGEGEVQLLESGGGIVQPGGSLKLSCAASGFTFNTYAMNWVRQAPGKGLEWVARIRSKYNNYATYYADSVKDRFTISRDDSKNTVYLQMNNLKTEDTAVYYCVRHENFGNSYVSWFAHWGQGTLVTVSSGTAEAASASGEAGRSANHTPAGLTGPPGSPAGSPTSTEEGTSESATPESGPGTSTEPSEGSAPGSPAGSPTSTEEGTSTEPSEGSAPGTSTEPSEGSAPGTSESATPESGPGSEPATSGSETPGSEPATSGSETPGSPAGSPTSTEEGTSESATPESGPGTSTEPSEGSAPGTSTEPSEGSAPGSPAGSPTSTEEGTSTEPSEGSAPGTSTEPSEGSAPGTSESATPESGPGTSTEPSEGSAPGTSESATPESGPGSEPATSGSETPGTSTEPSEGSAPGTSTEPSEGSAPGTSESATPESGPGTSESATPESGPGSPAGSPTSTEEGTSESATPESGPGSEPATSGSETPGTSESATPESGPGTSTEPSEGSAPGTSTEPSEGSAPGTSTEPSEGSAPGTSTEPSEGSAPGTSTEPSEGSAPGTSTEPSEGSAPGSPAGSPTSTEEGTSTEPSEGSAPGTSESATPESGPGSEPATSGSETPGTSESATPESGPGSEPATSGSETPGTSESATPESGPGTSTEPSEGSAPGTSESATPESGPGSPAGSPTSTEEGSPAGSPTSTEEGSPAGSPTSTEEGTSESATPESGPGTSTEPSEGSAPGAAEPEA

SEQ ID NO: 1061 - protein, 1459 aa, Artificial Sequence
  Description of Artificial Sequence: Synthetic polypeptide
HHHHHHSPAGSPTSTEEGTSESATPESGPGTSTEPSEGSAPGTSESATPESGPGSEPATSGSETPGTSESATPESGPGSEPATSGSETPGTSESATPESGPGTSTEPSEGSAPGSPAGSPTSTEEGTSESATPESGPGSEPATSGSETPGTSESATPESGPGSPAGSPTSTEEGSPAGSPTSTEEGTSTEPSEGSAPGTSESATPESGPGTSESATPESGPGTSESATPESGPGSEPATSGSETPGSEPATSGSETPGSPAGSPTSTEEGTSTEPSEGSAPGTSTEPSEGSAPGGSAPEAGRSANHTPAGLTGPATSGSETPGTDIQMTQSPSSLSASVGDRVTITCQASQDISNYLNWYQQKPGKAPKLLIYDASNLETGVPSRFSGSGSGTDFTFTISSLQPEDIATYFCQHFDHLPLAFGGGTKVEIKGATPPETGAETESPGETTGGSAESEPPGEGQVQLQESGPGLVKPSETLSLTCTVSGGSVSSGDYYWTWIRQSPGKGLEWIGHIYYSGNTNYNPSLKSRLTISIDTSKTQFSLKLSSVTAADTAIYYCVRDRVTGAFDIWGQGTMVTVSSGGGGSELVVTQEPSLTVSPGGTVTLTCRSSNGEVTTSNYANWVQQKPGQAPRGLIGGTIKRAPGTPARFSGSLLGGKAALTLSGVQPEDEAVYYCALWYPNLWVFGGGTKLTVLGATPPETGAETESPGETTGGSAESEPPGEGEVQLLESGGGIVQPGGSLKLSCAASGFTFNTYAMNWVRQAPGKGLEWVARIRSKYNNYATYYADSVKDRFTISRDDSKNTVYLQMNNLKTEDTAVYYCVRHENFGNSYVSWFAHWGQGTLVTVSSGTAEAASASGEAGRSANHTPAGLTGPPGSPAGSPTSTEEGTSESATPESGPGTSTEPSEGSAPGSPAGSPTSTEEGTSTEPSEGSAPGTSTEPSEGSAPGTSESATPESGPGSEPATSGSETPGSEPATSGSETPGSPAGSPTSTEEGTSESATPESGPGTSTEPSEGSAPGTSTEPSEGSAPGSPAGSPTSTEEGTSTEPSEGSAPGTSTEPSEGSAPGTSESATPESGPGTSTEPSEGSAPGTSESATPESGPGSEPATSGSETPGTSTEPSEGSAPGTSTEPSEGSAPGTSESATPESGPGTSESATPESGPGSPAGSPTSTEEGTSESATPESGPGSEPATSGSETPGTSESATPESGPGTSTEPSEGSAPGTSTEPSEGSAPGTSTEPSEGSAPGTSTEPSEGSAPGTSTEPSEGSAPGTSTEPSEGSAPGSPAGSPTSTEEGTSTEPSEGSAPGTSESATPESGPGSEPATSGSETPGTSESATPESGPGSEPATSGSETPGTSESATPESGPGTSTEPSEGSAPGTSESATPESGPGSPAGSPTSTEEGSPAGSPTSTEEGSPAGSPTSTEEGTSESATPESGPGTSTEPSEGSAPGAAEPEA

SEQ ID NO: 1062 - protein, 1459 aa, Artificial Sequence
  Description of Artificial Sequence: Synthetic polypeptide
HHHHHHSPAGSPTSTEEGTSESATPESGPGTSTEPSEGSAPGTSESATPESGPGSEPATSGSETPGTSESATPESGPGSEPATSGSETPGTSESATPESGPGTSTEPSEGSAPGSPAGSPTSTEEGTSESATPESGPGSEPATSGSETPGTSESATPESGPGSPAGSPTSTEEGSPAGSPTSTEEGTSTEPSEGSAPGTSESATPESGPGTSESATPESGPGTSESATPESGPGSEPATSGSETPGSEPATSGSETPGSPAGSPTSTEEGTSTEPSEGSAPGTSTEPSEGSAPGGSAPEAGRSANHTPAGLTGPATSGSETPGTDIQMTQSPSSLSASVGDRVTITCQASQDISNYLNWYQQKPGKAPKLLIYDASNLETGVPSRFSGSGSGTDFTFTISSLQPEDIATYFCQHFDHLPLAFGGGTKVEIKGATPPETGAETESPGETTGGSAESEPPGEGQVQLQESGPGLVKPSETLSLTCTVSGGSVSSGDYYWTWIRQSPGKGLEWIGHIYYSGNTNYNPSLKSRLTISIDTSKTQFSLKLSSVTAADTAIYYCVRDRVTGAFDIWGQGTMVTVSSGGGGSELVVTQEPSHTVSPGGTVTLTCRSSTGAVTSSNYANWVQQKPGQAPRGLIGGTIKRAPGTPARFSGSLLGGKAALTLSGVQPEDEAEYYCALWYPNLWVFGGGTKLTVLGATPPETGAETESPGETTGGSAESEPPGEGEVQLLESGGGIVQPGGSLKLSCAASGFTFNTYAMNWVRQAPGKGLEWVARIRSKYNNYATYYADSVKDRFTISRDDSKNTVYLQMNNLKTEDTAVYYCVRHENFGNSYVSWFAHWGQGTLVTVSSGTAEAASASGEAGRSANHTPAGLTGPPGSPAGSPTSTEEGTSESATPESGPGTSTEPSEGSAPGSPAGSPTSTEEGTSTEPSEGSAPGTSTEPSEGSAPGTSESATPESGPGSEPATSGSETPGSEPATSGSETPGSPAGSPTSTEEGTSESATPESGPGTSTEPSEGSAPGTSTEPSEGSAPGSPAGSPTSTEEGTSTEPSEGSAPGTSTEPSEGSAPGTSESATPESGPGTSTEPSEGSAPGTSESATPESGPGSEPATSGSETPGTSTEPSEGSAPGTSTEPSEGSAPGTSESATPESGPGTSESATPESGPGSPAGSPTSTEEGTSESATPESGPGSEPATSGSETPGTSESATPESGPGTSTEPSEGSAPGTSTEPSEGSAPGTSTEPSEGSAPGTSTEPSEGSAPGTSTEPSEGSAPGTSTEPSEGSAPGSPAGSPTSTEEGTSTEPSEGSAPGTSESATPESGPGSEPATSGSETPGTSESATPESGPGSEPATSGSETPGTSESATPESGPGTSTEPSEGSAPGTSESATPESGPGSPAGSPTSTEEGSPAGSPTSTEEGSPAGSPTSTEEGTSESATPESGPGTSTEPSEGSAPGAAEPEA

SEQ ID NO: 1063 - protein, 1459 aa, Artificial Sequence
  Description of Artificial Sequence: Synthetic polypeptide
HHHHHHSPAGSPTSTEEGTSESATPESGPGTSTEPSEGSAPGTSESATPESGPGSEPATSGSETPGTSESATPESGPGSEPATSGSETPGTSESATPESGPGTSTEPSEGSAPGSPAGSPTSTEEGTSESATPESGPGSEPATSGSETPGTSESATPESGPGSPAGSPTSTEEGSPAGSPTSTEEGTSTEPSEGSAPGTSESATPESGPGTSESATPESGPGTSESATPESGPGSEPATSGSETPGSEPATSGSETPGSPAGSPTSTEEGTSTEPSEGSAPGTSTEPSEGSAPGGSAPEAGRSANHTPAGLTGPATSGSETPGTDIQMTQSPSSLSASVGDRVTITCQASQDISNYLNWYQQKPGKAPKLLIYDASNLETGVPSRFSGSGSGTDFTFTISSLQPEDIATYFCQHFDHLPLAFGGGTKVEIKGATPPETGAETESPGETTGGSAESEPPGEGQVQLQESGPGLVKPSETLSLTCTVSGGSVSSGDYYWTWIRQSPGKGLEWIGHIYYSGNTNYNPSLKSRLTISIDTSKTQFSLKLSSVTAADTAIYYCVRDRVTGAFDIWGQGTMVTVSSGGGGSELVVTQEPSHTVSPGGTVTLTCRSSTGEVTTSNYANWVQQKPGQAPRGLIGGTIKRAPGTPARFSGSLLGGKAALTLSGVQPEDEAEYYCALWYPNLWVFGGGTKLTVLGATPPETGAETESPGETTGGSAESEPPGEGEVQLLESGGGIVQPGGSLKLSCAASGFTFNTYAMNWVRQAPGKGLEWVARIRSKYNNYATYYADSVKDRFTISRDDSKNTVYLQMNNLKTEDTAVYYCVRHENFGNSYVSWFAHWGQGTLVTVSSGTAEAASASGEAGRSANHTPAGLTGPPGSPAGSPTSTEEGTSESATPESGPGTSTEPSEGSAPGSPAGSPTSTEEGTSTEPSEGSAPGTSTEPSEGSAPGTSESATPESGPGSEPATSGSETPGSEPATSGSETPGSPAGSPTSTEEGTSESATPESGPGTSTEPSEGSAPGTSTEPSEGSAPGSPAGSPTSTEEGTSTEPSEGSAPGTSTEPSEGSAPGTSESATPESGPGTSTEPSEGSAPGTSESATPESGPGSEPATSGSETPGTSTEPSEGSAPGTSTEPSEGSAPGTSESATPESGPGTSESATPESGPGSPAGSPTSTEEGTSESATPESGPGSEPATSGSETPGTSESATPESGPGTSTEPSEGSAPGTSTEPSEGSAPGTSTEPSEGSAPGTSTEPSEGSAPGTSTEPSEGSAPGTSTEPSEGSAPGSPAGSPTSTEEGTSTEPSEGSAPGTSESATPESGPGSEPATSGSETPGTSESATPESGPGSEPATSGSETPGTSESATPESGPGTSTEPSEGSAPGTSESATPESGPGSPAGSPTSTEEGSPAGSPTSTEEGSPAGSPTSTEEGTSESATPESGPGTSTEPSEGSAPGAAEPEA

SEQ ID NO: 1064 - protein, 1459 aa, Artificial Sequence
  Description of Artificial Sequence: Synthetic polypeptide
HHHHHHSPAGSPTSTEEGTSESATPESGPGTSTEPSEGSAPGTSESATPESGPGSEPATSGSETPGTSESATPESGPGSEPATSGSETPGTSESATPESGPGTSTEPSEGSAPGSPAGSPTSTEEGTSESATPESGPGSEPATSGSETPGTSESATPESGPGSPAGSPTSTEEGSPAGSPTSTEEGTSTEPSEGSAPGTSESATPESGPGTSESATPESGPGTSESATPESGPGSEPATSGSETPGSEPATSGSETPGSPAGSPTSTEEGTSTEPSEGSAPGTSTEPSEGSAPGGSAPEAGRSANHTPAGLTGPATSGSETPGTDIQMTQSPSSLSASVGDRVTITCQASQDISNYLNWYQQKPGKAPKLLIYDASNLETGVPSRFSGSGSGTDFTFTISSLQPEDIATYFCQHFDHLPLAFGGGTKVEIKGATPPETGAETESPGETTGGSAESEPPGEGQVQLQESGPGLVKPSETLSLTCTVSGGSVSSGDYYWTWIRQSPGKGLEWIGHIYYSGNTNYNPSLKSRLTISIDTSKTQFSLKLSSVTAADTAIYYCVRDRVTGAFDIWGQGTMVTVSSGGGGSELVVTQEPSLTVSPGGTVTLTCRSSNGAVTSSNYANWVQQKPGQAPRGLIGGTNKRAPGTPARFSGSSLGGKAALTLSGVQPEDEAVYYCALWYPNLWVFGGGTKLTVLGATPPETGAETESPGETTGGSAESEPPGEGEVQLQESGGGIVQPGGSLKLSCAASGFTFNTYAMNWVRQAPGKGLEWVARIRSKYNNYATYYADSVKDRFTISRDDSKNTVYLQMNNLKTEDTAVYYCVRHENFGNSYVSWFAHWGQGTLVTVSSGTAEAASASGEAGRSANHTPAGLTGPPGSPAGSPTSTEEGTSESATPESGPGTSTEPSEGSAPGSPAGSPTSTEEGTSTEPSEGSAPGTSTEPSEGSAPGTSESATPESGPGSEPATSGSETPGSEPATSGSETPGSPAGSPTSTEEGTSESATPESGPGTSTEPSEGSAPGTSTEPSEGSAPGSPAGSPTSTEEGTSTEPSEGSAPGTSTEPSEGSAPGTSESATPESGPGTSTEPSEGSAPGTSESATPESGPGSEPATSGSETPGTSTEPSEGSAPGTSTEPSEGSAPGTSESATPESGPGTSESATPESGPGSPAGSPTSTEEGTSESATPESGPGSEPATSGSETPGTSESATPESGPGTSTEPSEGSAPGTSTEPSEGSAPGTSTEPSEGSAPGTSTEPSEGSAPGTSTEPSEGSAPGTSTEPSEGSAPGSPAGSPTSTEEGTSTEPSEGSAPGTSESATPESGPGSEPATSGSETPGTSESATPESGPGSEPATSGSETPGTSESATPESGPGTSTEPSEGSAPGTSESATPESGPGSPAGSPTSTEEGSPAGSPTSTEEGSPAGSPTSTEEGTSESATPESGPGTSTEPSEGSAPGAAEPEA

SEQ ID NO: 1065 - protein, 1459 aa, Artificial Sequence
  Description of Artificial Sequence: Synthetic polypeptide
HHHHHHSPAGSPTSTEEGTSESATPESGPGTSTEPSEGSAPGTSESATPESGPGSEPATSGSETPGTSESATPESGPGSEPATSGSETPGTSESATPESGPGTSTEPSEGSAPGSPAGSPTSTEEGTSESATPESGPGSEPATSGSETPGTSESATPESGPGSPAGSPTSTEEGSPAGSPTSTEEGTSTEPSEGSAPGTSESATPESGPGTSESATPESGPGTSESATPESGPGSEPATSGSETPGSEPATSGSETPGSPAGSPTSTEEGTSTEPSEGSAPGTSTEPSEGSAPGGSAPEAGRSANHTPAGLTGPATSGSETPGTDIQMTQSPSSLSASVGDRVTITCQASQDISNYLNWYQQKPGKAPKLLIYDASNLETGVPSRFSGSGSGTDFTFTISSLQPEDIATYFCQHFDHLPLAFGGGTKVEIKGATPPETGAETESPGETTGGSAESEPPGEGQVQLQESGPGLVKPSETLSLTCTVSGGSVSSGDYYWTWIRQSPGKGLEWIGHIYYSGNTNYNPSLKSRLTISIDTSKTQFSLKLSSVTAADTAIYYCVRDRVTGAFDIWGQGTMVTVSSGGGGSELVVTQEPSLTVSPGGTVTLTCRSSNGAVTSSNYANWVQQKPGQAPRGLIGGTNKRAPGTPARFSGSLLGGSAALTLSGVQPEDEAVYYCALWYPNLWVFGGGTKLTVLGATPPETGAETESPGETTGGSAESEPPGEGEVQLQESGGGIVQPGGSLKLSCAASGFTFNTYAMNWVRQAPGKGLEWVARIRSKYNNYATYYADSVKDRFTISRDDSKNTVYLQMNNLKTEDTAVYYCVRHENFGNSYVSWFAHWGQGTLVTVSSGTAEAASASGEAGRSANHTPAGLTGPPGSPAGSPTSTEEGTSESATPESGPGTSTEPSEGSAPGSPAGSPTSTEEGTSTEPSEGSAPGTSTEPSEGSAPGTSESATPESGPGSEPATSGSETPGSEPATSGSETPGSPAGSPTSTEEGTSESATPESGPGTSTEPSEGSAPGTSTEPSEGSAPGSPAGSPTSTEEGTSTEPSEGSAPGTSTEPSEGSAPGTSESATPESGPGTSTEPSEGSAPGTSESATPESGPGSEPATSGSETPGTSTEPSEGSAPGTSTEPSEGSAPGTSESATPESGPGTSESATPESGPGSPAGSPTSTEEGTSESATPESGPGSEPATSGSETPGTSESATPESGPGTSTEPSEGSAPGTSTEPSEGSAPGTSTEPSEGSAPGTSTEPSEGSAPGTSTEPSEGSAPGTSTEPSEGSAPGSPAGSPTSTEEGTSTEPSEGSAPGTSESATPESGPGSEPATSGSETPGTSESATPESGPGSEPATSGSETPGTSESATPESGPGTSTEPSEGSAPGTSESATPESGPGSPAGSPTSTEEGSPAGSPTSTEEGSPAGSPTSTEEGTSESATPESGPGTSTEPSEGSAPGAAEPEA

SEQ ID NO: 1066 - protein, 1459 aa, Artificial Sequence
  Description of Artificial Sequence: Synthetic polypeptide
HHHHHHSPAGSPTSTEEGTSESATPESGPGTSTEPSEGSAPGTSESATPESGPGSEPATSGSETPGTSESATPESGPGSEPATSGSETPGTSESATPESGPGTSTEPSEGSAPGSPAGSPTSTEEGTSESATPESGPGSEPATSGSETPGTSESATPESGPGSPAGSPTSTEEGSPAGSPTSTEEGTSTEPSEGSAPGTSESATPESGPGTSESATPESGPGTSESATPESGPGSEPATSGSETPGSEPATSGSETPGSPAGSPTSTEEGTSTEPSEGSAPGTSTEPSEGSAPGGSAPEAGRSANHTPAGLTGPATSGSETPGTDIQMTQSPSSLSASVGDRVTITCQASQDISNYLNWYQQKPGKAPKLLIYDASNLETGVPSRFSGSGSGTDFTFTISSLQPEDIATYFCQHFDHLPLAFGGGTKVEIKGATPPETGAETESPGETTGGSAESEPPGEGQVQLQESGPGLVKPSETLSLTCTVSGGSVSSGDYYWTWIRQSPGKGLEWIGHIYYSGNTNYNPSLKSRLTISIDTSKTQFSLKLSSVTAADTAIYYCVRDRVTGAFDIWGQGTMVTVSSGGGGSELVVTQEPSLTVSPGGTVTLTCRSSNGAVTSSNYANWVQQKPGQAPRGLIGGTNKRAPGTPARFSGSSLGGSAALTLSGVQPEDEAVYYCALWYPNLWVFGGGTKLTVLGATPPETGAETESPGETTGGSAESEPPGEGEVQLQESGGGIVQPGGSLKLSCAASGFTFNTYAMNWVRQAPGKGLEWVARIRSKYNNYATYYADSVKDRFTISRDDSKNTVYLQMNNLKTEDTAVYYCVRHENFGNSYVSWFAHWGQGTLVTVSSGTAEAASASGEAGRSANHTPAGLTGPPGSPAGSPTSTEEGTSESATPESGPGTSTEPSEGSAPGSPAGSPTSTEEGTSTEPSEGSAPGTSTEPSEGSAPGTSESATPESGPGSEPATSGSETPGSEPATSGSETPGSPAGSPTSTEEGTSESATPESGPGTSTEPSEGSAPGTSTEPSEGSAPGSPAGSPTSTEEGTSTEPSEGSAPGTSTEPSEGSAPGTSESATPESGPGTSTEPSEGSAPGTSESATPESGPGSEPATSGSETPGTSTEPSEGSAPGTSTEPSEGSAPGTSESATPESGPGTSESATPESGPGSPAGSPTSTEEGTSESATPESGPGSEPATSGSETPGTSESATPESGPGTSTEPSEGSAPGTSTEPSEGSAPGTSTEPSEGSAPGTSTEPSEGSAPGTSTEPSEGSAPGTSTEPSEGSAPGSPAGSPTSTEEGTSTEPSEGSAPGTSESATPESGPGSEPATSGSETPGTSESATPESGPGSEPATSGSETPGTSESATPESGPGTSTEPSEGSAPGTSESATPESGPGSPAGSPTSTEEGSPAGSPTSTEEGSPAGSPTSTEEGTSESATPESGPGTSTEPSEGSAPGAAEPEA

SEQ ID NO: 1067 - protein, 1459 aa, Artificial Sequence
  Description of Artificial Sequence: Synthetic polypeptide
HHHHHHSPAGSPTSTEEGTSESATPESGPGTSTEPSEGSAPGTSESATPESGPGSEPATSGSETPGTSESATPESGPGSEPATSGSETPGTSESATPESGPGTSTEPSEGSAPGSPAGSPTSTEEGTSESATPESGPGSEPATSGSETPGTSESATPESGPGSPAGSPTSTEEGSPAGSPTSTEEGTSTEPSEGSAPGTSESATPESGPGTSESATPESGPGTSESATPESGPGSEPATSGSETPGSEPATSGSETPGSPAGSPTSTEEGTSTEPSEGSAPGTSTEPSEGSAPGGSAPEAGRSANHTPAGLTGPATSGSETPGTDIQMTQSPSSLSASVGDRVTITCQASQDISNYLNWYQQKPGKAPKLLIYDASNLETGVPSRFSGSGSGTDFTFTISSLQPEDIATYFCQHFDHLPLAFGGGTKVEIKGATPPETGAETESPGETTGGSAESEPPGEGQVQLQESGPGLVKPSETLSLTCTVSGGSVSSGDYYWTWIRQSPGKGLEWIGHIYYSGNTNYNPSLKSRLTISIDTSKTQFSLKLSSVTAADTAIYYCVRDRVTGAFDIWGQGTMVTVSSGGGGSELVVTQEPSLTVSPGGTVTLTCRSSTGAVTTSNYANWVQQKPGQAPRGLIGGTNKRAPGTPARFSGSSLGGSAALTLSGVQPEDEAEYYCALWYSNLWVFGGGTKLTVLGATPPETGAETESPGETTGGSAESEPPGEGEVQLQESGGGLVQPGGSLKLSCAASGFTFNTYAMNWVRQAPGKGLEWVARIRSKYNNYATYYADSVKDRFTISRDDSKNTAYLQMNNLKTEDTAVYYCVRHGNFGNSYVSWFAYWGQGTLVTVSSGTAEAASASGEAGRSANHTPAGLTGPPGSPAGSPTSTEEGTSESATPESGPGTSTEPSEGSAPGSPAGSPTSTEEGTSTEPSEGSAPGTSTEPSEGSAPGTSESATPESGPGSEPATSGSETPGSEPATSGSETPGSPAGSPTSTEEGTSESATPESGPGTSTEPSEGSAPGTSTEPSEGSAPGSPAGSPTSTEEGTSTEPSEGSAPGTSTEPSEGSAPGTSESATPESGPGTSTEPSEGSAPGTSESATPESGPGSEPATSGSETPGTSTEPSEGSAPGTSTEPSEGSAPGTSESATPESGPGTSESATPESGPGSPAGSPTSTEEGTSESATPESGPGSEPATSGSETPGTSESATPESGPGTSTEPSEGSAPGTSTEPSEGSAPGTSTEPSEGSAPGTSTEPSEGSAPGTSTEPSEGSAPGTSTEPSEGSAPGSPAGSPTSTEEGTSTEPSEGSAPGTSESATPESGPGSEPATSGSETPGTSESATPESGPGSEPATSGSETPGTSESATPESGPGTSTEPSEGSAPGTSESATPESGPGSPAGSPTSTEEGSPAGSPTSTEEGSPAGSPTSTEEGTSESATPESGPGTSTEPSEGSAPGAAEPEA

SEQ ID NO: 1068 - protein, 1459 aa, Artificial Sequence
  Description of Artificial Sequence: Synthetic polypeptide
HHHHHHSPAGSPTSTEEGTSESATPESGPGTSTEPSEGSAPGTSESATPESGPGSEPATSGSETPGTSESATPESGPGSEPATSGSETPGTSESATPESGPGTSTEPSEGSAPGSPAGSPTSTEEGTSESATPESGPGSEPATSGSETPGTSESATPESGPGSPAGSPTSTEEGSPAGSPTSTEEGTSTEPSEGSAPGTSESATPESGPGTSESATPESGPGTSESATPESGPGSEPATSGSETPGSEPATSGSETPGSPAGSPTSTEEGTSTEPSEGSAPGTSTEPSEGSAPGGSAPEAGRSANHTPAGLTGPATSGSETPGTDIQMTQSPSSLSASVGDRVTITCQASQDISNYLNWYQQKPGKAPKLLIYDASNLETGVPSRFSGSGSGTDFTFTISRLQPEDTATYFCQHFDHLPLAFGGGTKVEIKGATPPETGAETESPGETTGGSAESEPPGEGQVQLQESGPGAVKPSETLSLTCTVSGGSVSSGDYYWTWIRQSPGKGLEWIGHIYYSGNTNYNPSLKSRLTISIDTSKTQFSLKLSSVTAADTATYYCVRDRVTGAFDIWGQGTAVTVSSGGGGSELVVTQEPSLTVSPGGTVTLTCRSSNGAVTSSNYANWVQQKPGQAPRGLIGGTNKRAPGTPARFSGSLLGGKAALTLSGVQPEDEAVYYCALWYPNLWVFGGGTKLTVLGATPPETGAETESPGETTGGSAESEPPGEGEVQLLESGGGIVQPGGSLKLSCAASGFTFNTYAMNWVRQAPGKGLEWVARIRSKYNNYATYYADSVKDRFTISRDDSKNTVYLQMNNLKTEDTAVYYCVRHENFGNSYVSWFAHWGQGTLVTVSSGTAEAASASGEAGRSANHTPAGLTGPPGSPAGSPTSTEEGTSESATPESGPGTSTEPSEGSAPGSPAGSPTSTEEGTSTEPSEGSAPGTSTEPSEGSAPGTSESATPESGPGSEPATSGSETPGSEPATSGSETPGSPAGSPTSTEEGTSESATPESGPGTSTEPSEGSAPGTSTEPSEGSAPGSPAGSPTSTEEGTSTEPSEGSAPGTSTEPSEGSAPGTSESATPESGPGTSTEPSEGSAPGTSESATPESGPGSEPATSGSETPGTSTEPSEGSAPGTSTEPSEGSAPGTSESATPESGPGTSESATPESGPGSPAGSPTSTEEGTSESATPESGPGSEPATSGSETPGTSESATPESGPGTSTEPSEGSAPGTSTEPSEGSAPGTSTEPSEGSAPGTSTEPSEGSAPGTSTEPSEGSAPGTSTEPSEGSAPGSPAGSPTSTEEGTSTEPSEGSAPGTSESATPESGPGSEPATSGSETPGTSESATPESGPGSEPATSGSETPGTSESATPESGPGTSTEPSEGSAPGTSESATPESGPGSPAGSPTSTEEGSPAGSPTSTEEGSPAGSPTSTEEGTSESATPESGPGTSTEPSEGSAPGAAEPEA

SEQ ID NO: 1069 - protein, 1459 aa, Artificial Sequence
  Description of Artificial Sequence: Synthetic polypeptide
HHHHHHSPAGSPTSTEEGTSESATPESGPGTSTEPSEGSAPGTSESATPESGPGSEPATSGSETPGTSESATPESGPGSEPATSGSETPGTSESATPESGPGTSTEPSEGSAPGSPAGSPTSTEEGTSESATPESGPGSEPATSGSETPGTSESATPESGPGSPAGSPTSTEEGSPAGSPTSTEEGTSTEPSEGSAPGTSESATPESGPGTSESATPESGPGTSESATPESGPGSEPATSGSETPGSEPATSGSETPGSPAGSPTSTEEGTSTEPSEGSAPGTSTEPSEGSAPGGSAPEAGRSANHTPAGLTGPATSGSETPGTDIQMTQSPSSLSASVGDRVTITCQASQDISNYLNWYQQKPGKAPKLLIYDASNLETGVPSRFSGSGSGTDFTFTISRLQPEDTATYFCQHFDHLPLAFGGGTKVEIKGATPPETGAETESPGETTGGSAESEPPGEGQVQLQESGPGAVKPSETLSLTCTVSGGSVSSGDYYWTWIRQSPGKGLEWIGHIYYSGNTNYNPSLKSRLTISIDTSKTQFSLKLSSVTAADTATYYCVRDRVTGAFDIWGQGTAVTVSSGGGGSELVVTQEPSLTVSPGGTVTLTCRSSNGEVTTSNYANWVQQKPGQAPRGLIGGTIKRAPGTPARFSGSLLGGKAALTLSGVQPEDEAVYYCALWYPNLWVFGGGTKLTVLGATPPETGAETESPGETTGGSAESEPPGEGEVQLLESGGGIVQPGGSLKLSCAASGFTFNTYAMNWVRQAPGKGLEWVARIRSKYNNYATYYADSVKDRFTISRDDSKNTVYLQMNNLKTEDTAVYYCVRHENFGNSYVSWFAHWGQGTLVTVSSGTAEAASASGEAGRSANHTPAGLTGPPGSPAGSPTSTEEGTSESATPESGPGTSTEPSEGSAPGSPAGSPTSTEEGTSTEPSEGSAPGTSTEPSEGSAPGTSESATPESGPGSEPATSGSETPGSEPATSGSETPGSPAGSPTSTEEGTSESATPESGPGTSTEPSEGSAPGTSTEPSEGSAPGSPAGSPTSTEEGTSTEPSEGSAPGTSTEPSEGSAPGTSESATPESGPGTSTEPSEGSAPGTSESATPESGPGSEPATSGSETPGTSTEPSEGSAPGTSTEPSEGSAPGTSESATPESGPGTSESATPESGPGSPAGSPTSTEEGTSESATPESGPGSEPATSGSETPGTSESATPESGPGTSTEPSEGSAPGTSTEPSEGSAPGTSTEPSEGSAPGTSTEPSEGSAPGTSTEPSEGSAPGTSTEPSEGSAPGSPAGSPTSTEEGTSTEPSEGSAPGTSESATPESGPGSEPATSGSETPGTSESATPESGPGSEPATSGSETPGTSESATPESGPGTSTEPSEGSAPGTSESATPESGPGSPAGSPTSTEEGSPAGSPTSTEEGSPAGSPTSTEEGTSESATPESGPGTSTEPSEGSAPGAAEPEA

SEQ ID NO: 1070 - protein, 1459 aa, Artificial Sequence
  Description of Artificial Sequence: Synthetic polypeptide
HHHHHHSPAGSPTSTEEGTSESATPESGPGTSTEPSEGSAPGTSESATPESGPGSEPATSGSETPGTSESATPESGPGSEPATSGSETPGTSESATPESGPGTSTEPSEGSAPGSPAGSPTSTEEGTSESATPESGPGSEPATSGSETPGTSESATPESGPGSPAGSPTSTEEGSPAGSPTSTEEGTSTEPSEGSAPGTSESATPESGPGTSESATPESGPGTSESATPESGPGSEPATSGSETPGSEPATSGSETPGSPAGSPTSTEEGTSTEPSEGSAPGTSTEPSEGSAPGGSAPEAGRSANHTPAGLTGPATSGSETPGTDIQMTQSPSSLSASVGDRVTITCQASQDISNYLNWYQQKPGKAPKLLIYDASNLETGVPSRFSGSGSGTDFTFTISRLQPEDTATYFCQHFDHLPLAFGGGTKVEIKGATPPETGAETESPGETTGGSAESEPPGEGQVQLQESGPGAVKPSETLSLTCTVSGGSVSSGDYYWTWIRQSPGKGLEWIGHIYYSGNTNYNPSLKSRLTISIDTSKTQFSLKLSSVTAADTATYYCVRDRVTGAFDIWGQGTAVTVSSGGGGSELVVTQEPSHTVSPGGTVTLTCRSSTGAVTSSNYANWVQQKPGQAPRGLIGGTIKRAPGTPARFSGSLLGGKAALTLSGVQPEDEAEYYCALWYPNLWVFGGGTKLTVLGATPPETGAETESPGETTGGSAESEPPGEGEVQLLESGGGIVQPGGSLKLSCAASGFTFNTYAMNWVRQAPGKGLEWVARIRSKYNNYATYYADSVKDRFTISRDDSKNTVYLQMNNLKTEDTAVYYCVRHENFGNSYVSWFAHWGQGTLVTVSSGTAEAASASGEAGRSANHTPAGLTGPPGSPAGSPTSTEEGTSESATPESGPGTSTEPSEGSAPGSPAGSPTSTEEGTSTEPSEGSAPGTSTEPSEGSAPGTSESATPESGPGSEPATSGSETPGSEPATSGSETPGSPAGSPTSTEEGTSESATPESGPGTSTEPSEGSAPGTSTEPSEGSAPGSPAGSPTSTEEGTSTEPSEGSAPGTSTEPSEGSAPGTSESATPESGPGTSTEPSEGSAPGTSESATPESGPGSEPATSGSETPGTSTEPSEGSAPGTSTEPSEGSAPGTSESATPESGPGTSESATPESGPGSPAGSPTSTEEGTSESATPESGPGSEPATSGSETPGTSESATPESGPGTSTEPSEGSAPGTSTEPSEGSAPGTSTEPSEGSAPGTSTEPSEGSAPGTSTEPSEGSAPGTSTEPSEGSAPGSPAGSPTSTEEGTSTEPSEGSAPGTSESATPESGPGSEPATSGSETPGTSESATPESGPGSEPATSGSETPGTSESATPESGPGTSTEPSEGSAPGTSESATPESGPGSPAGSPTSTEEGSPAGSPTSTEEGSPAGSPTSTEEGTSESATPESGPGTSTEPSEGSAPGAAEPEA

SEQ ID NO: 1071 - protein, 1459 aa, Artificial Sequence
  Description of Artificial Sequence: Synthetic polypeptide
HHHHHHSPAGSPTSTEEGTSESATPESGPGTSTEPSEGSAPGTSESATPESGPGSEPATSGSETPGTSESATPESGPGSEPATSGSETPGTSESATPESGPGTSTEPSEGSAPGSPAGSPTSTEEGTSESATPESGPGSEPATSGSETPGTSESATPESGPGSPAGSPTSTEEGSPAGSPTSTEEGTSTEPSEGSAPGTSESATPESGPGTSESATPESGPGTSESATPESGPGSEPATSGSETPGSEPATSGSETPGSPAGSPTSTEEGTSTEPSEGSAPGTSTEPSEGSAPGGSAPEAGRSANHTPAGLTGPATSGSETPGTDIQMTQSPSSLSASVGDRVTITCQASQDISNYLNWYQQKPGKAPKLLIYDASNLETGVPSRFSGSGSGTDFTFTISRLQPEDTATYFCQHFDHLPLAFGGGTKVEIKGATPPETGAETESPGETTGGSAESEPPGEGQVQLQESGPGAVKPSETLSLTCTVSGGSVSSGDYYWTWIRQSPGKGLEWIGHIYYSGNTNYNPSLKSRLTISIDTSKTQFSLKLSSVTAADTATYYCVRDRVTGAFDIWGQGTAVTVSSGGGGSELVVTQEPSHTVSPGGTVTLTCRSSTGEVTTSNYANWVQQKPGQAPRGLIGGTIKRAPGTPARFSGSLLGGKAALTLSGVQPEDEAEYYCALWYPNLWVFGGGTKLTVLGATPPETGAETESPGETTGGSAESEPPGEGEVQLLESGGGIVQPGGSLKLSCAASGFTFNTYAMNWVRQAPGKGLEWVARIRSKYNNYATYYADSVKDRFTISRDDSKNTVYLQMNNLKTEDTAVYYCVRHENFGNSYVSWFAHWGQGTLVTVSSGTAEAASASGEAGRSANHTPAGLTGPPGSPAGSPTSTEEGTSESATPESGPGTSTEPSEGSAPGSPAGSPTSTEEGTSTEPSEGSAPGTSTEPSEGSAPGTSESATPESGPGSEPATSGSETPGSEPATSGSETPGSPAGSPTSTEEGTSESATPESGPGTSTEPSEGSAPGTSTEPSEGSAPGSPAGSPTSTEEGTSTEPSEGSAPGTSTEPSEGSAPGTSESATPESGPGTSTEPSEGSAPGTSESATPESGPGSEPATSGSETPGTSTEPSEGSAPGTSTEPSEGSAPGTSESATPESGPGTSESATPESGPGSPAGSPTSTEEGTSESATPESGPGSEPATSGSETPGTSESATPESGPGTSTEPSEGSAPGTSTEPSEGSAPGTSTEPSEGSAPGTSTEPSEGSAPGTSTEPSEGSAPGTSTEPSEGSAPGSPAGSPTSTEEGTSTEPSEGSAPGTSESATPESGPGSEPATSGSETPGTSESATPESGPGSEPATSGSETPGTSESATPESGPGTSTEPSEGSAPGTSESATPESGPGSPAGSPTSTEEGSPAGSPTSTEEGSPAGSPTSTEEGTSESATPESGPGTSTEPSEGSAPGAAEPEA

SEQ ID NO: 1072 - protein, 1459 aa, Artificial Sequence
  Description of Artificial Sequence: Synthetic polypeptide
HHHHHHSPAGSPTSTEEGTSESATPESGPGTSTEPSEGSAPGTSESATPESGPGSEPATSGSETPGTSESATPESGPGSEPATSGSETPGTSESATPESGPGTSTEPSEGSAPGSPAGSPTSTEEGTSESATPESGPGSEPATSGSETPGTSESATPESGPGSPAGSPTSTEEGSPAGSPTSTEEGTSTEPSEGSAPGTSESATPESGPGTSESATPESGPGTSESATPESGPGSEPATSGSETPGSEPATSGSETPGSPAGSPTSTEEGTSTEPSEGSAPGTSTEPSEGSAPGGSAPEAGRSANHTPAGLTGPATSGSETPGTDIQMTQSPSSLSASVGDRVTITCQASQDISNYLNWYQQKPGKAPKLLIYDASNLETGVPSRFSGSGSGTDFTFTISRLQPEDTATYFCQHFDHLPLAFGGGTKVEIKGATPPETGAETESPGETTGGSAESEPPGEGQVQLQESGPGAVKPSETLSLTCTVSGGSVSSGDYYWTWIRQSPGKGLEWIGHIYYSGNTNYNPSLKSRLTISIDTSKTQFSLKLSSVTAADTATYYCVRDRVTGAFDIWGQGTAVTVSSGGGGSELVVTQEPSLTVSPGGTVTLTCRSSNGAVTSSNYANWVQQKPGQAPRGLIGGTNKRAPGTPARFSGSSLGGKAALTLSGVQPEDEAVYYCALWYPNLWVFGGGTKLTVLGATPPETGAETESPGETTGGSAESEPPGEGEVQLQESGGGIVQPGGSLKLSCAASGFTFNTYAMNWVRQAPGKGLEWVARIRSKYNNYATYYADSVKDRFTISRDDSKNTVYLQMNNLKTEDTAVYYCVRHENFGNSYVSWFAHWGQGTLVTVSSGTAEAASASGEAGRSANHTPAGLTGPPGSPAGSPTSTEEGTSESATPESGPGTSTEPSEGSAPGSPAGSPTSTEEGTSTEPSEGSAPGTSTEPSEGSAPGTSESATPESGPGSEPATSGSETPGSEPATSGSETPGSPAGSPTSTEEGTSESATPESGPGTSTEPSEGSAPGTSTEPSEGSAPGSPAGSPTSTEEGTSTEPSEGSAPGTSTEPSEGSAPGTSESATPESGPGTSTEPSEGSAPGTSESATPESGPGSEPATSGSETPGTSTEPSEGSAPGTSTEPSEGSAPGTSESATPESGPGTSESATPESGPGSPAGSPTSTEEGTSESATPESGPGSEPATSGSETPGTSESATPESGPGTSTEPSEGSAPGTSTEPSEGSAPGTSTEPSEGSAPGTSTEPSEGSAPGTSTEPSEGSAPGTSTEPSEGSAPGSPAGSPTSTEEGTSTEPSEGSAPGTSESATPESGPGSEPATSGSETPGTSESATPESGPGSEPATSGSETPGTSESATPESGPGTSTEPSEGSAPGTSESATPESGPGSPAGSPTSTEEGSPAGSPTSTEEGSPAGSPTSTEEGTSESATPESGPGTSTEPSEGSAPGAAEPEA

SEQ ID NO: 1073 - protein, 1459 aa, Artificial Sequence
  Description of Artificial Sequence: Synthetic polypeptide
HHHHHHSPAGSPTSTEEGTSESATPESGPGTSTEPSEGSAPGTSESATPESGPGSEPATSGSETPGTSESATPESGPGSEPATSGSETPGTSESATPESGPGTSTEPSEGSAPGSPAGSPTSTEEGTSESATPESGPGSEPATSGSETPGTSESATPESGPGSPAGSPTSTEEGSPAGSPTSTEEGTSTEPSEGSAPGTSESATPESGPGTSESATPESGPGTSESATPESGPGSEPATSGSETPGSEPATSGSETPGSPAGSPTSTEEGTSTEPSEGSAPGTSTEPSEGSAPGGSAPEAGRSANHTPAGLTGPATSGSETPGTDIQMTQSPSSLSASVGDRVTITCQASQDISNYLNWYQQKPGKAPKLLIYDASNLETGVPSRFSGSGSGTDFTFTISRLQPEDTATYFCQHFDHLPLAFGGGTKVEIKGATPPETGAETESPGETTGGSAESEPPGEGQVQLQESGPGAVKPSETLSLTCTVSGGSVSSGDYYWTWIRQSPGKGLEWIGHIYYSGNTNYNPSLKSRLTISIDTSKTQFSLKLSSVTAADTATYYCVRDRVTGAFDIWGQGTAVTVSSGGGGSELVVTQEPSLTVSPGGTVTLTCRSSNGAVTSSNYANWVQQKPGQAPRGLIGGTNKRAPGTPARFSGSLLGGSAALTLSGVQPEDEAVYYCALWYPNLWVFGGGTKLTVLGATPPETGAETESPGETTGGSAESEPPGEGEVQLQESGGGIVQPGGSLKLSCAASGFTFNTYAMNWVRQAPGKGLEWVARIRSKYNNYATYYADSVKDRFTISRDDSKNTVYLQMNNLKTEDTAVYYCVRHENFGNSYVSWFAHWGQGTLVTVSSGTAEAASASGEAGRSANHTPAGLTGPPGSPAGSPTSTEEGTSESATPESGPGTSTEPSEGSAPGSPAGSPTSTEEGTSTEPSEGSAPGTSTEPSEGSAPGTSESATPESGPGSEPATSGSETPGSEPATSGSETPGSPAGSPTSTEEGTSESATPESGPGTSTEPSEGSAPGTSTEPSEGSAPGSPAGSPTSTEEGTSTEPSEGSAPGTSTEPSEGSAPGTSESATPESGPGTSTEPSEGSAPGTSESATPESGPGSEPATSGSETPGTSTEPSEGSAPGTSTEPSEGSAPGTSESATPESGPGTSESATPESGPGSPAGSPTSTEEGTSESATPESGPGSEPATSGSETPGTSESATPESGPGTSTEPSEGSAPGTSTEPSEGSAPGTSTEPSEGSAPGTSTEPSEGSAPGTSTEPSEGSAPGTSTEPSEGSAPGSPAGSPTSTEEGTSTEPSEGSAPGTSESATPESGPGSEPATSGSETPGTSESATPESGPGSEPATSGSETPGTSESATPESGPGTSTEPSEGSAPGTSESATPESGPGSPAGSPTSTEEGSPAGSPTSTEEGSPAGSPTSTEEGTSESATPESGPGTSTEPSEGSAPGAAEPEA

SEQ ID NO: 1074 - protein, 1459 aa, Artificial Sequence
  Description of Artificial Sequence: Synthetic polypeptide
HHHHHHSPAGSPTSTEEGTSESATPESGPGTSTEPSEGSAPGTSESATPESGPGSEPATSGSETPGTSESATPESGPGSEPATSGSETPGTSESATPESGPGTSTEPSEGSAPGSPAGSPTSTEEGTSESATPESGPGSEPATSGSETPGTSESATPESGPGSPAGSPTSTEEGSPAGSPTSTEEGTSTEPSEGSAPGTSESATPESGPGTSESATPESGPGTSESATPESGPGSEPATSGSETPGSEPATSGSETPGSPAGSPTSTEEGTSTEPSEGSAPGTSTEPSEGSAPGGSAPEAGRSANHTPAGLTGPATSGSETPGTDIQMTQSPSSLSASVGDRVTITCQASQDISNYLNWYQQKPGKAPKLLIYDASNLETGVPSRFSGSGSGTDFTFTISRLQPEDTATYFCQHFDHLPLAFGGGTKVEIKGATPPETGAETESPGETTGGSAESEPPGEGQVQLQESGPGAVKPSETLSLTCTVSGGSVSSGDYYWTWIRQSPGKGLEWIGHIYYSGNTNYNPSLKSRLTISIDTSKTQFSLKLSSVTAADTATYYCVRDRVTGAFDIWGQGTAVTVSSGGGGSELVVTQEPSLTVSPGGTVTLTCRSSNGAVTSSNYANWVQQKPGQAPRGLIGGTNKRAPGTPARFSGSSLGGSAALTLSGVQPEDEAVYYCALWYPNLWVFGGGTKLTVLGATPPETGAETESPGETTGGSAESEPPGEGEVQLQESGGGIVQPGGSLKLSCAASGFTFNTYAMNWVRQAPGKGLEWVARIRSKYNNYATYYADSVKDRFTISRDDSKNTVYLQMNNLKTEDTAVYYCVRHENFGNSYVSWFAHWGQGTLVTVSSGTAEAASASGEAGRSANHTPAGLTGPPGSPAGSPTSTEEGTSESATPESGPGTSTEPSEGSAPGSPAGSPTSTEEGTSTEPSEGSAPGTSTEPSEGSAPGTSESATPESGPGSEPATSGSETPGSEPATSGSETPGSPAGSPTSTEEGTSESATPESGPGTSTEPSEGSAPGTSTEPSEGSAPGSPAGSPTSTEEGTSTEPSEGSAPGTSTEPSEGSAPGTSESATPESGPGTSTEPSEGSAPGTSESATPESGPGSEPATSGSETPGTSTEPSEGSAPGTSTEPSEGSAPGTSESATPESGPGTSESATPESGPGSPAGSPTSTEEGTSESATPESGPGSEPATSGSETPGTSESATPESGPGTSTEPSEGSAPGTSTEPSEGSAPGTSTEPSEGSAPGTSTEPSEGSAPGTSTEPSEGSAPGTSTEPSEGSAPGSPAGSPTSTEEGTSTEPSEGSAPGTSESATPESGPGSEPATSGSETPGTSESATPESGPGSEPATSGSETPGTSESATPESGPGTSTEPSEGSAPGTSESATPESGPGSPAGSPTSTEEGSPAGSPTSTEEGSPAGSPTSTEEGTSESATPESGPGTSTEPSEGSAPGAAEPEA

SEQ ID NO: 1075 - protein, 1459 aa, Artificial Sequence
  Description of Artificial Sequence: Synthetic polypeptide
HHHHHHSPAGSPTSTEEGTSESATPESGPGTSTEPSEGSAPGTSESATPESGPGSEPATSGSETPGTSESATPESGPGSEPATSGSETPGTSESATPESGPGTSTEPSEGSAPGSPAGSPTSTEEGTSESATPESGPGSEPATSGSETPGTSESATPESGPGSPAGSPTSTEEGSPAGSPTSTEEGTSTEPSEGSAPGTSESATPESGPGTSESATPESGPGTSESATPESGPGSEPATSGSETPGSEPATSGSETPGSPAGSPTSTEEGTSTEPSEGSAPGTSTEPSEGSAPGGSAPEAGRSANHTPAGLTGPATSGSETPGTDIQMTQSPSSLSASVGDRVTITCQASQDISNYLNWYQQKPGKAPKLLIYDASNLETGVPSRFSGSGSGTDFTFTISRLQPEDTATYFCQHFDHLPLAFGGGTKVEIKGATPPETGAETESPGETTGGSAESEPPGEGQVQLQESGPGAVKPSETLSLTCTVSGGSVSSGDYYWTWIRQSPGKGLEWIGHIYYSGNTNYNPSLKSRLTISIDTSKTQFSLKLSSVTAADTATYYCVRDRVTGAFDIWGQGTAVTVSSGGGGSELVVTQEPSLTVSPGGTVTLTCRSSTGAVTTSNYANWVQQKPGQAPRGLIGGTNKRAPGTPARFSGSSLGGSAALTLSGVQPEDEAEYYCALWYSNLWVFGGGTKLTVLGATPPETGAETESPGETTGGSAESEPPGEGEVQLQESGGGLVQPGGSLKLSCAASGFTFNTYAMNWVRQAPGKGLEWVARIRSKYNNYATYYADSVKDRFTISRDDSKNTAYLQMNNLKTEDTAVYYCVRHGNFGNSYVSWFAYWGQGTLVTVSSGTAEAASASGEAGRSANHTPAGLTGPPGSPAGSPTSTEEGTSESATPESGPGTSTEPSEGSAPGSPAGSPTSTEEGTSTEPSEGSAPGTSTEPSEGSAPGTSESATPESGPGSEPATSGSETPGSEPATSGSETPGSPAGSPTSTEEGTSESATPESGPGTSTEPSEGSAPGTSTEPSEGSAPGSPAGSPTSTEEGTSTEPSEGSAPGTSTEPSEGSAPGTSESATPESGPGTSTEPSEGSAPGTSESATPESGPGSEPATSGSETPGTSTEPSEGSAPGTSTEPSEGSAPGTSESATPESGPGTSESATPESGPGSPAGSPTSTEEGTSESATPESGPGSEPATSGSETPGTSESATPESGPGTSTEPSEGSAPGTSTEPSEGSAPGTSTEPSEGSAPGTSTEPSEGSAPGTSTEPSEGSAPGTSTEPSEGSAPGSPAGSPTSTEEGTSTEPSEGSAPGTSESATPESGPGSEPATSGSETPGTSESATPESGPGSEPATSGSETPGTSESATPESGPGTSTEPSEGSAPGTSESATPESGPGSPAGSPTSTEEGSPAGSPTSTEEGSPAGSPTSTEEGTSESATPESGPGTSTEPSEGSAPGAAEPEA

SEQ ID NO: 1076 - protein, 1743 aa, Artificial Sequence
  Description of Artificial Sequence: Synthetic polypeptide
HHHHHHSPAGSPTSTEEGTSESATPESGPGTSTEPSEGSAPGTSESATPESGPGSEPATSGSETPGTSESATPESGPGSEPATSGSETPGTSESATPESGPGTSTEPSEGSAPGSPAGSPTSTEEGTSESATPESGPGSEPATSGSETPGTSESATPESGPGSPAGSPTSTEEGSPAGSPTSTEEGTSTEPSEGSAPGTSESATPESGPGTSESATPESGPGTSESATPESGPGSEPATSGSETPGSEPATSGSETPGSPAGSPTSTEEGTSTEPSEGSAPGTSTEPSEGSAPGGSAPEAGRSANHTPAGLTGPATSGSETPGTDIQMTQSPSSLSASVGDRVTITCKASQDVSIGVAWYQQKPGKAPKLLIYSASYRYTGVPSRFSGSGSGTDFTLTISSLQPEDFATYYCQQYYIYPYTFGQGTKVEIKGATPPETGAETESPGETTGGSAESEPPGEGEVQLVESGGGLVQPGGSLRLSCAASGFTFTDYTMDWVRQAPGKGLEWVADVNPNSGGSIYNQRFKGRFTLSVDRSKNTLYLQMNSLRAEDTAVYYCARNLGPSFYFDYWGQGTLVTVSSGGGGSELVVTQEPSLTVSPGGTVTLTCRSSNGEVTTSNYANWVQQKPGQAPRGLIGGTIKRAPGTPARFSGSLLGGKAALTLSGVQPEDEAVYYCALWYPNLWVFGGGTKLTVLGATPPETGAETESPGETTGGSAESEPPGEGEVQLLESGGGIVQPGGSLKLSCAASGFTFNTYAMNWVRQAPGKGLEWVARIRSKYNNYATYYADSVKDRFTISRDDSKNTVYLQMNNLKTEDTAVYYCVRHENFGNSYVSWFAHWGQGTLVTVSSGTAEAASASGEAGRSANHTPAGLTGPPGSPAGSPTSTEEGTSESATPESGPGTSTEPSEGSAPGSPAGSPTSTEEGTSTEPSEGSAPGTSTEPSEGSAPGTSESATPESGPGSEPATSGSETPGSEPATSGSETPGSPAGSPTSTEEGTSESATPESGPGTSTEPSEGSAPGTSTEPSEGSAPGSPAGSPTSTEEGTSTEPSEGSAPGTSTEPSEGSAPGTSESATPESGPGTSTEPSEGSAPGTSESATPESGPGSEPATSGSETPGTSTEPSEGSAPGTSTEPSEGSAPGTSESATPESGPGTSESATPESGPGSPAGSPTSTEEGTSESATPESGPGSEPATSGSETPGTSESATPESGPGTSTEPSEGSAPGTSTEPSEGSAPGTSTEPSEGSAPGTSTEPSEGSAPGTSTEPSEGSAPGTSTEPSEGSAPGSPAGSPTSTEEGTSTEPSEGSAPGTSESATPESGPGSEPATSGSETPGTSESATPESGPGSEPATSGSETPGTSESATPESGPGTSTEPSEGSAPGTSESATPESGPGSPAGSPTSTEEGSPAGSPTSTEEGSPAGSPTSTEEGTSESATPESGPGTSTEPSEGSAPGTSESATPESGPGSEPATSGSETPGTSESATPESGPGSEPATSGSETPGTSESATPESGPGTSTEPSEGSAPGSPAGSPTSTEEGTSESATPESGPGSEPATSGSETPGTSESATPESGPGSPAGSPTSTEEGSPAGSPTSTEEGTSTEPSEGSAPGTSESATPESGPGTSESATPESGPGTSESATPESGPGSEPATSGSETPGSEPATSGSETPGSPAGSPTSTEEGTSTEPSEGSAPGTSTEPSEGSAPGSEPATSGSETPGTSESATPESGPGTSTEPSEGAAEPEA

SEQ ID NO: 1077 - protein, 1743 aa, Artificial Sequence
  Description of Artificial Sequence: Synthetic polypeptide
HHHHHHSPAGSPTSTEEGTSESATPESGPGTSTEPSEGSAPGTSESATPESGPGSEPATSGSETPGTSESATPESGPGSEPATSGSETPGTSESATPESGPGTSTEPSEGSAPGSPAGSPTSTEEGTSESATPESGPGSEPATSGSETPGTSESATPESGPGSPAGSPTSTEEGSPAGSPTSTEEGTSTEPSEGSAPGTSESATPESGPGTSESATPESGPGTSESATPESGPGSEPATSGSETPGSEPATSGSETPGSPAGSPTSTEEGTSTEPSEGSAPGTSTEPSEGSAPGGSAPEAGRSANHTPAGLTGPATSGSETPGTDIQMTQSPSSLSASVGDRVTITCKASQDVSIGVAWYQQKPGKAPKLLIYSASYRYTGVPSRFSGSGSGTDFTLTISSLQPEDFATYYCQQYYIYPYTFGQGTKVEIKGATPPETGAETESPGETTGGSAESEPPGEGEVQLVESGGGLVQPGGSLRLSCAASGFTFTDYTMDWVRQAPGKGLEWVADVNPNSGGSIYNQRFKGRFTLSVDRSKNTLYLQMNSLRAEDTAVYYCARNLGPSFYFDYWGQGTLVTVSSGGGGSELVVTQEPSHTVSPGGTVTLTCRSSTGAVTSSNYANWVQQKPGQAPRGLIGGTIKRAPGTPARFSGSLLGGKAALTLSGVQPEDEAEYYCALWYPNLWVFGGGTKLTVLGATPPETGAETESPGETTGGSAESEPPGEGEVQLLESGGGIVQPGGSLKLSCAASGFTFNTYAMNWVRQAPGKGLEWVARIRSKYNNYATYYADSVKDRFTISRDDSKNTVYLQMNNLKTEDTAVYYCVRHENFGNSYVSWFAHWGQGTLVTVSSGTAEAASASGEAGRSANHTPAGLTGPPGSPAGSPTSTEEGTSESATPESGPGTSTEPSEGSAPGSPAGSPTSTEEGTSTEPSEGSAPGTSTEPSEGSAPGTSESATPESGPGSEPATSGSETPGSEPATSGSETPGSPAGSPTSTEEGTSESATPESGPGTSTEPSEGSAPGTSTEPSEGSAPGSPAGSPTSTEEGTSTEPSEGSAPGTSTEPSEGSAPGTSESATPESGPGTSTEPSEGSAPGTSESATPESGPGSEPATSGSETPGTSTEPSEGSAPGTSTEPSEGSAPGTSESATPESGPGTSESATPESGPGSPAGSPTSTEEGTSESATPESGPGSEPATSGSETPGTSESATPESGPGTSTEPSEGSAPGTSTEPSEGSAPGTSTEPSEGSAPGTSTEPSEGSAPGTSTEPSEGSAPGTSTEPSEGSAPGSPAGSPTSTEEGTSTEPSEGSAPGTSESATPESGPGSEPATSGSETPGTSESATPESGPGSEPATSGSETPGTSESATPESGPGTSTEPSEGSAPGTSESATPESGPGSPAGSPTSTEEGSPAGSPTSTEEGSPAGSPTSTEEGTSESATPESGPGTSTEPSEGSAPGTSESATPESGPGSEPATSGSETPGTSESATPESGPGSEPATSGSETPGTSESATPESGPGTSTEPSEGSAPGSPAGSPTSTEEGTSESATPESGPGSEPATSGSETPGTSESATPESGPGSPAGSPTSTEEGSPAGSPTSTEEGTSTEPSEGSAPGTSESATPESGPGTSESATPESGPGTSESATPESGPGSEPATSGSETPGSEPATSGSETPGSPAGSPTSTEEGTSTEPSEGSAPGTSTEPSEGSAPGSEPATSGSETPGTSESATPESGPGTSTEPSEGAAEPEA

SEQ ID NO: 1078 - protein, 1743 aa, Artificial Sequence
  Description of Artificial Sequence: Synthetic polypeptide
HHHHHHSPAGSPTSTEEGTSESATPESGPGTSTEPSEGSAPGTSESATPESGPGSEPATSGSETPGTSESATPESGPGSEPATSGSETPGTSESATPESGPGTSTEPSEGSAPGSPAGSPTSTEEGTSESATPESGPGSEPATSGSETPGTSESATPESGPGSPAGSPTSTEEGSPAGSPTSTEEGTSTEPSEGSAPGTSESATPESGPGTSESATPESGPGTSESATPESGPGSEPATSGSETPGSEPATSGSETPGSPAGSPTSTEEGTSTEPSEGSAPGTSTEPSEGSAPGGSAPEAGRSANHTPAGLTGPATSGSETPGTDIQMTQSPSSLSASVGDRVTITCKASQDVSIGVAWYQQKPGKAPKLLIYSASYRYTGVPSRFSGSGSGTDFTLTISSLQPEDFATYYCQQYYIYPYTFGQGTKVEIKGATPPETGAETESPGETTGGSAESEPPGEGEVQLVESGGGLVQPGGSLRLSCAASGFTFTDYTMDWVRQAPGKGLEWVADVNPNSGGSIYNQRFKGRFTLSVDRSKNTLYLQMNSLRAEDTAVYYCARNLGPSFYFDYWGQGTLVTVSSGGGGSELVVTQEPSHTVSPGGTVTLTCRSSTGEVTTSNYANWVQQKPGQAPRGLIGGTIKRAPGTPARFSGSLLGGKAALTLSGVQPEDEAEYYCALWYPNLWVFGGGTKLTVLGATPPETGAETESPGETTGGSAESEPPGEGEVQLLESGGGIVQPGGSLKLSCAASGFTFNTYAMNWVRQAPGKGLEWVARIRSKYNNYATYYADSVKDRFTISRDDSKNTVYLQMNNLKTEDTAVYYCVRHENFGNSYVSWFAHWGQGTLVTVSSGTAEAASASGEAGRSANHTPAGLTGPPGSPAGSPTSTEEGTSESATPESGPGTSTEPSEGSAPGSPAGSPTSTEEGTSTEPSEGSAPGTSTEPSEGSAPGTSESATPESGPGSEPATSGSETPGSEPATSGSETPGSPAGSPTSTEEGTSESATPESGPGTSTEPSEGSAPGTSTEPSEGSAPGSPAGSPTSTEEGTSTEPSEGSAPGTSTEPSEGSAPGTSESATPESGPGTSTEPSEGSAPGTSESATPESGPGSEPATSGSETPGTSTEPSEGSAPGTSTEPSEGSAPGTSESATPESGPGTSESATPESGPGSPAGSPTSTEEGTSESATPESGPGSEPATSGSETPGTSESATPESGPGTSTEPSEGSAPGTSTEPSEGSAPGTSTEPSEGSAPGTSTEPSEGSAPGTSTEPSEGSAPGTSTEPSEGSAPGSPAGSPTSTEEGTSTEPSEGSAPGTSESATPESGPGSEPATSGSETPGTSESATPESGPGSEPATSGSETPGTSESATPESGPGTSTEPSEGSAPGTSESATPESGPGSPAGSPTSTEEGSPAGSPTSTEEGSPAGSPTSTEEGTSESATPESGPGTSTEPSEGSAPGTSESATPESGPGSEPATSGSETPGTSESATPESGPGSEPATSGSETPGTSESATPESGPGTSTEPSEGSAPGSPAGSPTSTEEGTSESATPESGPGSEPATSGSETPGTSESATPESGPGSPAGSPTSTEEGSPAGSPTSTEEGTSTEPSEGSAPGTSESATPESGPGTSESATPESGPGTSESATPESGPGSEPATSGSETPGSEPATSGSETPGSPAGSPTSTEEGTSTEPSEGSAPGTSTEPSEGSAPGSEPATSGSETPGTSESATPESGPGTSTEPSEGAAEPEA

SEQ ID NO: 1079 - protein, 1743 aa, Artificial Sequence
  Description of Artificial Sequence: Synthetic polypeptide
HHHHHHSPAGSPTSTEEGTSESATPESGPGTSTEPSEGSAPGTSESATPESGPGSEPATSGSETPGTSESATPESGPGSEPATSGSETPGTSESATPESGPGTSTEPSEGSAPGSPAGSPTSTEEGTSESATPESGPGSEPATSGSETPGTSESATPESGPGSPAGSPTSTEEGSPAGSPTSTEEGTSTEPSEGSAPGTSESATPESGPGTSESATPESGPGTSESATPESGPGSEPATSGSETPGSEPATSGSETPGSPAGSPTSTEEGTSTEPSEGSAPGTSTEPSEGSAPGGSAPEAGRSANHTPAGLTGPATSGSETPGTDIQMTQSPSSLSASVGDRVTITCKASQDVSIGVAWYQQKPGKAPKLLIYSASYRYTGVPSRFSGSGSGTDFTLTISSLQPEDFATYYCQQYYIYPYTFGQGTKVEIKGATPPETGAETESPGETTGGSAESEPPGEGEVQLVESGGGLVQPGGSLRLSCAASGFTFTDYTMDWVRQAPGKGLEWVADVNPNSGGSIYNQRFKGRFTLSVDRSKNTLYLQMNSLRAEDTAVYYCARNLGPSFYFDYWGQGTLVTVSSGGGGSELVVTQEPSLTVSPGGTVTLTCRSSNGAVTSSNYANWVQQKPGQAPRGLIGGTNKRAPGTPARFSGSSLGGKAALTLSGVQPEDEAVYYCALWYPNLWVFGGGTKLTVLGATPPETGAETESPGETTGGSAESEPPGEGEVQLQESGGGIVQPGGSLKLSCAASGFTFNTYAMNWVRQAPGKGLEWVARIRSKYNNYATYYADSVKDRFTISRDDSKNTVYLQMNNLKTEDTAVYYCVRHENFGNSYVSWFAHWGQGTLVTVSSGTAEAASASGEAGRSANHTPAGLTGPPGSPAGSPTSTEEGTSESATPESGPGTSTEPSEGSAPGSPAGSPTSTEEGTSTEPSEGSAPGTSTEPSEGSAPGTSESATPESGPGSEPATSGSETPGSEPATSGSETPGSPAGSPTSTEEGTSESATPESGPGTSTEPSEGSAPGTSTEPSEGSAPGSPAGSPTSTEEGTSTEPSEGSAPGTSTEPSEGSAPGTSESATPESGPGTSTEPSEGSAPGTSESATPESGPGSEPATSGSETPGTSTEPSEGSAPGTSTEPSEGSAPGTSESATPESGPGTSESATPESGPGSPAGSPTSTEEGTSESATPESGPGSEPATSGSETPGTSESATPESGPGTSTEPSEGSAPGTSTEPSEGSAPGTSTEPSEGSAPGTSTEPSEGSAPGTSTEPSEGSAPGTSTEPSEGSAPGSPAGSPTSTEEGTSTEPSEGSAPGTSESATPESGPGSEPATSGSETPGTSESATPESGPGSEPATSGSETPGTSESATPESGPGTSTEPSEGSAPGTSESATPESGPGSPAGSPTSTEEGSPAGSPTSTEEGSPAGSPTSTEEGTSESATPESGPGTSTEPSEGSAPGTSESATPESGPGSEPATSGSETPGTSESATPESGPGSEPATSGSETPGTSESATPESGPGTSTEPSEGSAPGSPAGSPTSTEEGTSESATPESGPGSEPATSGSETPGTSESATPESGPGSPAGSPTSTEEGSPAGSPTSTEEGTSTEPSEGSAPGTSESATPESGPGTSESATPESGPGTSESATPESGPGSEPATSGSETPGSEPATSGSETPGSPAGSPTSTEEGTSTEPSEGSAPGTSTEPSEGSAPGSEPATSGSETPGTSESATPESGPGTSTEPSEGAAEPEA

SEQ ID NO: 1080 - protein, 1743 aa, Artificial Sequence
  Description of Artificial Sequence: Synthetic polypeptide
HHHHHHSPAGSPTSTEEGTSESATPESGPGTSTEPSEGSAPGTSESATPESGPGSEPATSGSETPGTSESATPESGPGSEPATSGSETPGTSESATPESGPGTSTEPSEGSAPGSPAGSPTSTEEGTSESATPESGPGSEPATSGSETPGTSESATPESGPGSPAGSPTSTEEGSPAGSPTSTEEGTSTEPSEGSAPGTSESATPESGPGTSESATPESGPGTSESATPESGPGSEPATSGSETPGSEPATSGSETPGSPAGSPTSTEEGTSTEPSEGSAPGTSTEPSEGSAPGGSAPEAGRSANHTPAGLTGPATSGSETPGTDIQMTQSPSSLSASVGDRVTITCKASQDVSIGVAWYQQKPGKAPKLLIYSASYRYTGVPSRFSGSGSGTDFTLTISSLQPEDFATYYCQQYYIYPYTFGQGTKVEIKGATPPETGAETESPGETTGGSAESEPPGEGEVQLVESGGGLVQPGGSLRLSCAASGFTFTDYTMDWVRQAPGKGLEWVADVNPNSGGSIYNQRFKGRFTLSVDRSKNTLYLQMNSLRAEDTAVYYCARNLGPSFYFDYWGQGTLVTVSSGGGGSELVVTQEPSLTVSPGGTVTLTCRSSNGAVTSSNYANWVQQKPGQAPRGLIGGTNKRAPGTPARFSGSLLGGSAALTLSGVQPEDEAVYYCALWYPNLWVFGGGTKLTVLGATPPETGAETESPGETTGGSAESEPPGEGEVQLQESGGGIVQPGGSLKLSCAASGFTFNTYAMNWVRQAPGKGLEWVARIRSKYNNYATYYADSVKDRFTISRDDSKNTVYLQMNNLKTEDTAVYYCVRHENFGNSYVSWFAHWGQGTLVTVSSGTAEAASASGEAGRSANHTPAGLTGPPGSPAGSPTSTEEGTSESATPESGPGTSTEPSEGSAPGSPAGSPTSTEEGTSTEPSEGSAPGTSTEPSEGSAPGTSESATPESGPGSEPATSGSETPGSEPATSGSETPGSPAGSPTSTEEGTSESATPESGPGTSTEPSEGSAPGTSTEPSEGSAPGSPAGSPTSTEEGTSTEPSEGSAPGTSTEPSEGSAPGTSESATPESGPGTSTEPSEGSAPGTSESATPESGPGSEPATSGSETPGTSTEPSEGSAPGTSTEPSEGSAPGTSESATPESGPGTSESATPESGPGSPAGSPTSTEEGTSESATPESGPGSEPATSGSETPGTSESATPESGPGTSTEPSEGSAPGTSTEPSEGSAPGTSTEPSEGSAPGTSTEPSEGSAPGTSTEPSEGSAPGTSTEPSEGSAPGSPAGSPTSTEEGTSTEPSEGSAPGTSESATPESGPGSEPATSGSETPGTSESATPESGPGSEPATSGSETPGTSESATPESGPGTSTEPSEGSAPGTSESATPESGPGSPAGSPTSTEEGSPAGSPTSTEEGSPAGSPTSTEEGTSESATPESGPGTSTEPSEGSAPGTSESATPESGPGSEPATSGSETPGTSESATPESGPGSEPATSGSETPGTSESATPESGPGTSTEPSEGSAPGSPAGSPTSTEEGTSESATPESGPGSEPATSGSETPGTSESATPESGPGSPAGSPTSTEEGSPAGSPTSTEEGTSTEPSEGSAPGTSESATPESGPGTSESATPESGPGTSESATPESGPGSEPATSGSETPGSEPATSGSETPGSPAGSPTSTEEGTSTEPSEGSAPGTSTEPSEGSAPGSEPATSGSETPGTSESATPESGPGTSTEPSEGAAEPEA

SEQ ID NO: 1081 - protein, 1743 aa, Artificial Sequence
  Description of Artificial Sequence: Synthetic polypeptide
HHHHHHSPAGSPTSTEEGTSESATPESGPGTSTEPSEGSAPGTSESATPESGPGSEPATSGSETPGTSESATPESGPGSEPATSGSETPGTSESATPESGPGTSTEPSEGSAPGSPAGSPTSTEEGTSESATPESGPGSEPATSGSETPGTSESATPESGPGSPAGSPTSTEEGSPAGSPTSTEEGTSTEPSEGSAPGTSESATPESGPGTSESATPESGPGTSESATPESGPGSEPATSGSETPGSEPATSGSETPGSPAGSPTSTEEGTSTEPSEGSAPGTSTEPSEGSAPGGSAPEAGRSANHTPAGLTGPATSGSETPGTDIQMTQSPSSLSASVGDRVTITCKASQDVSIGVAWYQQKPGKAPKLLIYSASYRYTGVPSRFSGSGSGTDFTLTISSLQPEDFATYYCQQYYIYPYTFGQGTKVEIKGATPPETGAETESPGETTGGSAESEPPGEGEVQLVESGGGLVQPGGSLRLSCAASGFTFTDYTMDWVRQAPGKGLEWVADVNPNSGGSIYNQRFKGRFTLSVDRSKNTLYLQMNSLRAEDTAVYYCARNLGPSFYFDYWGQGTLVTVSSGGGGSELVVTQEPSLTVSPGGTVTLTCRSSNGAVTSSNYANWVQQKPGQAPRGLIGGTNKRAPGTPARFSGSSLGGSAALTLSGVQPEDEAVYYCALWYPNLWVFGGGTKLTVLGATPPETGAETESPGETTGGSAESEPPGEGEVQLQESGGGIVQPGGSLKLSCAASGFTFNTYAMNWVRQAPGKGLEWVARIRSKYNNYATYYADSVKDRFTISRDDSKNTVYLQMNNLKTEDTAVYYCVRHENFGNSYVSWFAHWGQGTLVTVSSGTAEAASASGEAGRSANHTPAGLTGPPGSPAGSPTSTEEGTSESATPESGPGTSTEPSEGSAPGSPAGSPTSTEEGTSTEPSEGSAPGTSTEPSEGSAPGTSESATPESGPGSEPATSGSETPGSEPATSGSETPGSPAGSPTSTEEGTSESATPESGPGTSTEPSEGSAPGTSTEPSEGSAPGSPAGSPTSTEEGTSTEPSEGSAPGTSTEPSEGSAPGTSESATPESGPGTSTEPSEGSAPGTSESATPESGPGSEPATSGSETPGTSTEPSEGSAPGTSTEPSEGSAPGTSESATPESGPGTSESATPESGPGSPAGSPTSTEEGTSESATPESGPGSEPATSGSETPGTSESATPESGPGTSTEPSEGSAPGTSTEPSEGSAPGTSTEPSEGSAPGTSTEPSEGSAPGTSTEPSEGSAPGTSTEPSEGSAPGSPAGSPTSTEEGTSTEPSEGSAPGTSESATPESGPGSEPATSGSETPGTSESATPESGPGSEPATSGSETPGTSESATPESGPGTSTEPSEGSAPGTSESATPESGPGSPAGSPTSTEEGSPAGSPTSTEEGSPAGSPTSTEEGTSESATPESGPGTSTEPSEGSAPGTSESATPESGPGSEPATSGSETPGTSESATPESGPGSEPATSGSETPGTSESATPESGPGTSTEPSEGSAPGSPAGSPTSTEEGTSESATPESGPGSEPATSGSETPGTSESATPESGPGSPAGSPTSTEEGSPAGSPTSTEEGTSTEPSEGSAPGTSESATPESGPGTSESATPESGPGTSESATPESGPGSEPATSGSETPGSEPATSGSETPGSPAGSPTSTEEGTSTEPSEGSAPGTSTEPSEGSAPGSEPATSGSETPGTSESATPESGPGTSTEPSEGAAEPEA

SEQ ID NO: 1082 - protein, 1743 aa, Artificial Sequence
  Description of Artificial Sequence: Synthetic polypeptide
HHHHHHSPAGSPTSTEEGTSESATPESGPGTSTEPSEGSAPGTSESATPESGPGSEPATSGSETPGTSESATPESGPGSEPATSGSETPGTSESATPESGPGTSTEPSEGSAPGSPAGSPTSTEEGTSESATPESGPGSEPATSGSETPGTSESATPESGPGSPAGSPTSTEEGSPAGSPTSTEEGTSTEPSEGSAPGTSESATPESGPGTSESATPESGPGTSESATPESGPGSEPATSGSETPGSEPATSGSETPGSPAGSPTSTEEGTSTEPSEGSAPGTSTEPSEGSAPGGSAPEAGRSANHTPAGLTGPATSGSETPGTDIQMTQSPSSLSASVGDRVTITCKASQDVSIGVAWYQQKPGKAPKLLIYSASYRYTGVPSRFSGSGSGTDFTLTISSLQPEDFATYYCQQYYIYPYTFGQGTKVEIKGATPPETGAETESPGETTGGSAESEPPGEGEVQLVESGGGLVQPGGSLRLSCAASGFTFTDYTMDWVRQAPGKGLEWVADVNPNSGGSIYNQRFKGRFTLSVDRSKNTLYLQMNSLRAEDTAVYYCARNLGPSFYFDYWGQGTLVTVSSGGGGSELVVTQEPSLTVSPGGTVTLTCRSSTGAVTTSNYANWVQQKPGQAPRGLIGGTNKRAPGTPARFSGSSLGGSAALTLSGVQPEDEAEYYCALWYSNLWVFGGGTKLTVLGATPPETGAETESPGETTGGSAESEPPGEGEVQLQESGGGLVQPGGSLKLSCAASGFTFNTYAMNWVRQAPGKGLEWVARIRSKYNNYATYYADSVKDRFTISRDDSKNTAYLQMNNLKTEDTAVYYCVRHGNFGNSYVSWFAYWGQGTLVTVSSGTAEAASASGEAGRSANHTPAGLTGPPGSPAGSPTSTEEGTSESATPESGPGTSTEPSEGSAPGSPAGSPTSTEEGTSTEPSEGSAPGTSTEPSEGSAPGTSESATPESGPGSEPATSGSETPGSEPATSGSETPGSPAGSPTSTEEGTSESATPESGPGTSTEPSEGSAPGTSTEPSEGSAPGSPAGSPTSTEEGTSTEPSEGSAPGTSTEPSEGSAPGTSESATPESGPGTSTEPSEGSAPGTSESATPESGPGSEPATSGSETPGTSTEPSEGSAPGTSTEPSEGSAPGTSESATPESGPGTSESATPESGPGSPAGSPTSTEEGTSESATPESGPGSEPATSGSETPGTSESATPESGPGTSTEPSEGSAPGTSTEPSEGSAPGTSTEPSEGSAPGTSTEPSEGSAPGTSTEPSEGSAPGTSTEPSEGSAPGSPAGSPTSTEEGTSTEPSEGSAPGTSESATPESGPGSEPATSGSETPGTSESATPESGPGSEPATSGSETPGTSESATPESGPGTSTEPSEGSAPGTSESATPESGPGSPAGSPTSTEEGSPAGSPTSTEEGSPAGSPTSTEEGTSESATPESGPGTSTEPSEGSAPGTSESATPESGPGSEPATSGSETPGTSESATPESGPGSEPATSGSETPGTSESATPESGPGTSTEPSEGSAPGSPAGSPTSTEEGTSESATPESGPGSEPATSGSETPGTSESATPESGPGSPAGSPTSTEEGSPAGSPTSTEEGTSTEPSEGSAPGTSESATPESGPGTSESATPESGPGTSESATPESGPGSEPATSGSETPGSEPATSGSETPGSPAGSPTSTEEGTSTEPSEGSAPGTSTEPSEGSAPGSEPATSGSETPGTSESATPESGPGTSTEPSEGAAEPEA

SEQ ID NO: 1083 - protein, 1020 aa, Artificial Sequence
  Description of Artificial Sequence: Synthetic polypeptide
HHHHHHGSPAGSPTSTEEGTSESATPESGPGTSTEPSEGSAPGSPAGSPTSTEEGTSTEPSEGSAPGTSTEPSEGSAPGTSESATPESGPGSEPATSGSETPGSEPATSGSETPGSPAGSPTSTEEGTSESATPESGPGTSTEPSEGSAPEAGRSANHTPAGLTGPATSGSETPGTDIQMTQSPSSLSASVGDRVTITCKASQDVSIGVAWYQQKPGKAPKLLIYSASYRYTGVPSRFSGSGSGTDFTLTISSLQPEDFATYYCQQYYIYPYTFGQGTKVEIKGATPPETGAETESPGETTGGSAESEPPGEGEVQLVESGGGLVQPGGSLRLSCAASGFTFTDYTMDWVRQAPGKGLEWVADVNPNSGGSIYNQRFKGRFTLSVDRSKNTLYLQMNSLRAEDTAVYYCARNLGPSFYFDYWGQGTLVTVSSGGGGSELVVTQEPSLTVSPGGTVTLTCRSSNGEVTTSNYANWVQQKPGQAPRGLIGGTIKRAPGTPARFSGSLLGGKAALTLSGVQPEDEAVYYCALWYPNLWVFGGGTKLTVLGATPPETGAETESPGETTGGSAESEPPGEGEVQLLESGGGIVQPGGSLKLSCAASGFTFNTYAMNWVRQAPGKGLEWVARIRSKYNNYATYYADSVKDRFTISRDDSKNTVYLQMNNLKTEDTAVYYCVRHENFGNSYVSWFAHWGQGTLVTVSSGTAEAASASGEAGRSANHTPAGLTGPPGSPAGSPTSTEEGTSESATPESGPGTSTEPSEGSAPGSPAGSPTSTEEGTSTEPSEGSAPGTSTEPSEGSAPGTSESATPESGPGSEPATSGSETPGSEPATSGSETPGSPAGSPTSTEEGTSESATPESGPGTSTEPSEGSAPGTSTEPSEGSAPGSPAGSPTSTEEGTSTEPSEGSAPGTSTEPSEGSAPGTSESATPESGPGTSTEPSEGSAPGTSESATPESGPGSEPATSGSETPGTSTEPSEGSAPGTSTEPSEGSAPGTSESATPESGPGTSESATPEGAAEPEA

SEQ ID NO: 1084 - protein, 1020 aa, Artificial Sequence
  Description of Artificial Sequence: Synthetic polypeptide
HHHHHHGSPAGSPTSTEEGTSESATPESGPGTSTEPSEGSAPGSPAGSPTSTEEGTSTEPSEGSAPGTSTEPSEGSAPGTSESATPESGPGSEPATSGSETPGSEPATSGSETPGSPAGSPTSTEEGTSESATPESGPGTSTEPSEGSAPEAGRSANHTPAGLTGPATSGSETPGTDIQMTQSPSSLSASVGDRVTITCKASQDVSIGVAWYQQKPGKAPKLLIYSASYRYTGVPSRFSGSGSGTDFTLTISSLQPEDFATYYCQQYYIYPYTFGQGTKVEIKGATPPETGAETESPGETTGGSAESEPPGEGEVQLVESGGGLVQPGGSLRLSCAASGFTFTDYTMDWVRQAPGKGLEWVADVNPNSGGSIYNQRFKGRFTLSVDRSKNTLYLQMNSLRAEDTAVYYCARNLGPSFYFDYWGQGTLVTVSSGGGGSELVVTQEPSHTVSPGGTVTLTCRSSTGAVTSSNYANWVQQKPGQAPRGLIGGTIKRAPGTPARFSGSLLGGKAALTLSGVQPEDEAEYYCALWYPNLWVFGGGTKLTVLGATPPETGAETESPGETTGGSAESEPPGEGEVQLLESGGGIVQPGGSLKLSCAASGFTFNTYAMNWVRQAPGKGLEWVARIRSKYNNYATYYADSVKDRFTISRDDSKNTVYLQMNNLKTEDTAVYYCVRHENFGNSYVSWFAHWGQGTLVTVSSGTAEAASASGEAGRSANHTPAGLTGPPGSPAGSPTSTEEGTSESATPESGPGTSTEPSEGSAPGSPAGSPTSTEEGTSTEPSEGSAPGTSTEPSEGSAPGTSESATPESGPGSEPATSGSETPGSEPATSGSETPGSPAGSPTSTEEGTSESATPESGPGTSTEPSEGSAPGTSTEPSEGSAPGSPAGSPTSTEEGTSTEPSEGSAPGTSTEPSEGSAPGTSESATPESGPGTSTEPSEGSAPGTSESATPESGPGSEPATSGSETPGTSTEPSEGSAPGTSTEPSEGSAPGTSESATPESGPGTSESATPEGAAEPEA

SEQ ID NO: 1085 - protein, 1020 aa, Artificial Sequence
  Description of Artificial Sequence: Synthetic polypeptide
HHHHHHGSPAGSPTSTEEGTSESATPESGPGTSTEPSEGSAPGSPAGSPTSTEEGTSTEPSEGSAPGTSTEPSEGSAPGTSESATPESGPGSEPATSGSETPGSEPATSGSETPGSPAGSPTSTEEGTSESATPESGPGTSTEPSEGSAPEAGRSANHTPAGLTGPATSGSETPGTDIQMTQSPSSLSASVGDRVTITCKASQDVSIGVAWYQQKPGKAPKLLIYSASYRYTGVPSRFSGSGSGTDFTLTISSLQPEDFATYYCQQYYIYPYTFGQGTKVEIKGATPPETGAETESPGETTGGSAESEPPGEGEVQLVESGGGLVQPGGSLRLSCAASGFTFTDYTMDWVRQAPGKGLEWVADVNPNSGGSIYNQRFKGRFTLSVDRSKNTLYLQMNSLRAEDTAVYYCARNLGPSFYFDYWGQGTLVTVSSGGGGSELVVTQEPSHTVSPGGTVTLTCRSSTGEVTTSNYANWVQQKPGQAPRGLIGGTIKRAPGTPARFSGSLLGGKAALTLSGVQPEDEAEYYCALWYPNLWVFGGGTKLTVLGATPPETGAETESPGETTGGSAESEPPGEGEVQLLESGGGIVQPGGSLKLSCAASGFTFNTYAMNWVRQAPGKGLEWVARIRSKYNNYATYYADSVKDRFTISRDDSKNTVYLQMNNLKTEDTAVYYCVRHENFGNSYVSWFAHWGQGTLVTVSSGTAEAASASGEAGRSANHTPAGLTGPPGSPAGSPTSTEEGTSESATPESGPGTSTEPSEGSAPGSPAGSPTSTEEGTSTEPSEGSAPGTSTEPSEGSAPGTSESATPESGPGSEPATSGSETPGSEPATSGSETPGSPAGSPTSTEEGTSESATPESGPGTSTEPSEGSAPGTSTEPSEGSAPGSPAGSPTSTEEGTSTEPSEGSAPGTSTEPSEGSAPGTSESATPESGPGTSTEPSEGSAPGTSESATPESGPGSEPATSGSETPGTSTEPSEGSAPGTSTEPSEGSAPGTSESATPESGPGTSESATPEGAAEPEA

SEQ ID NO: 1086 - protein, 1020 aa, Artificial Sequence
  Description of Artificial Sequence: Synthetic polypeptide
HHHHHHGSPAGSPTSTEEGTSESATPESGPGTSTEPSEGSAPGSPAGSPTSTEEGTSTEPSEGSAPGTSTEPSEGSAPGTSESATPESGPGSEPATSGSETPGSEPATSGSETPGSPAGSPTSTEEGTSESATPESGPGTSTEPSEGSAPEAGRSANHTPAGLTGPATSGSETPGTDIQMTQSPSSLSASVGDRVTITCKASQDVSIGVAWYQQKPGKAPKLLIYSASYRYTGVPSRFSGSGSGTDFTLTISSLQPEDFATYYCQQYYIYPYTFGQGTKVEIKGATPPETGAETESPGETTGGSAESEPPGEGEVQLVESGGGLVQPGGSLRLSCAASGFTFTDYTMDWVRQAPGKGLEWVADVNPNSGGSIYNQRFKGRFTLSVDRSKNTLYLQMNSLRAEDTAVYYCARNLGPSFYFDYWGQGTLVTVSSGGGGSELVVTQEPSLTVSPGGTVTLTCRSSNGAVTSSNYANWVQQKPGQAPRGLIGGTNKRAPGTPARFSGSSLGGKAALTLSGVQPEDEAVYYCALWYPNLWVFGGGTKLTVLGATPPETGAETESPGETTGGSAESEPPGEGEVQLQESGGGIVQPGGSLKLSCAASGFTFNTYAMNWVRQAPGKGLEWVARIRSKYNNYATYYADSVKDRFTISRDDSKNTVYLQMNNLKTEDTAVYYCVRHENFGNSYVSWFAHWGQGTLVTVSSGTAEAASASGEAGRSANHTPAGLTGPPGSPAGSPTSTEEGTSESATPESGPGTSTEPSEGSAPGSPAGSPTSTEEGTSTEPSEGSAPGTSTEPSEGSAPGTSESATPESGPGSEPATSGSETPGSEPATSGSETPGSPAGSPTSTEEGTSESATPESGPGTSTEPSEGSAPGTSTEPSEGSAPGSPAGSPTSTEEGTSTEPSEGSAPGTSTEPSEGSAPGTSESATPESGPGTSTEPSEGSAPGTSESATPESGPGSEPATSGSETPGTSTEPSEGSAPGTSTEPSEGSAPGTSESATPESGPGTSESATPEGAAEPEA

SEQ ID NO: 1087 - protein, 1020 aa, Artificial Sequence
  Description of Artificial Sequence: Synthetic polypeptide
HHHHHHGSPAGSPTSTEEGTSESATPESGPGTSTEPSEGSAPGSPAGSPTSTEEGTSTEPSEGSAPGTSTEPSEGSAPGTSESATPESGPGSEPATSGSETPGSEPATSGSETPGSPAGSPTSTEEGTSESATPESGPGTSTEPSEGSAPEAGRSANHTPAGLTGPATSGSETPGTDIQMTQSPSSLSASVGDRVTITCKASQDVSIGVAWYQQKPGKAPKLLIYSASYRYTGVPSRFSGSGSGTDFTLTISSLQPEDFATYYCQQYYIYPYTFGQGTKVEIKGATPPETGAETESPGETTGGSAESEPPGEGEVQLVESGGGLVQPGGSLRLSCAASGFTFTDYTMDWVRQAPGKGLEWVADVNPNSGGSIYNQRFKGRFTLSVDRSKNTLYLQMNSLRAEDTAVYYCARNLGPSFYFDYWGQGTLVTVSSGGGGSELVVTQEPSLTVSPGGTVTLTCRSSNGAVTSSNYANWVQQKPGQAPRGLIGGTNKRAPGTPARFSGSLLGGSAALTLSGVQPEDEAVYYCALWYPNLWVFGGGTKLTVLGATPPETGAETESPGETTGGSAESEPPGEGEVQLQESGGGIVQPGGSLKLSCAASGFTFNTYAMNWVRQAPGKGLEWVARIRSKYNNYATYYADSVKDRFTISRDDSKNTVYLQMNNLKTEDTAVYYCVRHENFGNSYVSWFAHWGQGTLVTVSSGTAEAASASGEAGRSANHTPAGLTGPPGSPAGSPTSTEEGTSESATPESGPGTSTEPSEGSAPGSPAGSPTSTEEGTSTEPSEGSAPGTSTEPSEGSAPGTSESATPESGPGSEPATSGSETPGSEPATSGSETPGSPAGSPTSTEEGTSESATPESGPGTSTEPSEGSAPGTSTEPSEGSAPGSPAGSPTSTEEGTSTEPSEGSAPGTSTEPSEGSAPGTSESATPESGPGTSTEPSEGSAPGTSESATPESGPGSEPATSGSETPGTSTEPSEGSAPGTSTEPSEGSAPGTSESATPESGPGTSESATPEGAAEPEA

SEQ ID NO: 1088 - protein, 1020 aa, Artificial Sequence
  Description of Artificial Sequence: Synthetic polypeptide
HHHHHHGSPAGSPTSTEEGTSESATPESGPGTSTEPSEGSAPGSPAGSPTSTEEGTSTEPSEGSAPGTSTEPSEGSAPGTSESATPESGPGSEPATSGSETPGSEPATSGSETPGSPAGSPTSTEEGTSESATPESGPGTSTEPSEGSAPEAGRSANHTPAGLTGPATSGSETPGTDIQMTQSPSSLSASVGDRVTITCKASQDVSIGVAWYQQKPGKAPKLLIYSASYRYTGVPSRFSGSGSGTDFTLTISSLQPEDFATYYCQQYYIYPYTFGQGTKVEIKGATPPETGAETESPGETTGGSAESEPPGEGEVQLVESGGGLVQPGGSLRLSCAASGFTFTDYTMDWVRQAPGKGLEWVADVNPNSGGSIYNQRFKGRFTLSVDRSKNTLYLQMNSLRAEDTAVYYCARNLGPSFYFDYWGQGTLVTVSSGGGGSELVVTQEPSLTVSPGGTVTLTCRSSNGAVTSSNYANWVQQKPGQAPRGLIGGTNKRAPGTPARFSGSSLGGSAALTLSGVQPEDEAVYYCALWYPNLWVFGGGTKLTVLGATPPETGAETESPGETTGGSAESEPPGEGEVQLQESGGGIVQPGGSLKLSCAASGFTFNTYAMNWVRQAPGKGLEWVARIRSKYNNYATYYADSVKDRFTISRDDSKNTVYLQMNNLKTEDTAVYYCVRHENFGNSYVSWFAHWGQGTLVTVSSGTAEAASASGEAGRSANHTPAGLTGPPGSPAGSPTSTEEGTSESATPESGPGTSTEPSEGSAPGSPAGSPTSTEEGTSTEPSEGSAPGTSTEPSEGSAPGTSESATPESGPGSEPATSGSETPGSEPATSGSETPGSPAGSPTSTEEGTSESATPESGPGTSTEPSEGSAPGTSTEPSEGSAPGSPAGSPTSTEEGTSTEPSEGSAPGTSTEPSEGSAPGTSESATPESGPGTSTEPSEGSAPGTSESATPESGPGSEPATSGSETPGTSTEPSEGSAPGTSTEPSEGSAPGTSESATPESGPGTSESATPEGAAEPEA

SEQ ID NO: 1089 - protein, 1020 aa, Artificial Sequence
  Description of Artificial Sequence: Synthetic polypeptide
HHHHHHGSPAGSPTSTEEGTSESATPESGPGTSTEPSEGSAPGSPAGSPTSTEEGTSTEPSEGSAPGTSTEPSEGSAPGTSESATPESGPGSEPATSGSETPGSEPATSGSETPGSPAGSPTSTEEGTSESATPESGPGTSTEPSEGSAPEAGRSANHTPAGLTGPATSGSETPGTDIQMTQSPSSLSASVGDRVTITCKASQDVSIGVAWYQQKPGKAPKLLIYSASYRYTGVPSRFSGSGSGTDFTLTISSLQPEDFATYYCQQYYIYPYTFGQGTKVEIKGATPPETGAETESPGETTGGSAESEPPGEGEVQLVESGGGLVQPGGSLRLSCAASGFTFTDYTMDWVRQAPGKGLEWVADVNPNSGGSIYNQRFKGRFTLSVDRSKNTLYLQMNSLRAEDTAVYYCARNLGPSFYFDYWGQGTLVTVSSGGGGSELVVTQEPSLTVSPGGTVTLTCRSSTGAVTTSNYANWVQQKPGQAPRGLIGGTNKRAPGTPARFSGSSLGGSAALTLSGVQPEDEAEYYCALWYSNLWVFGGGTKLTVLGATPPETGAETESPGETTGGSAESEPPGEGEVQLQESGGGLVQPGGSLKLSCAASGFTFNTYAMNWVRQAPGKGLEWVARIRSKYNNYATYYADSVKDRFTISRDDSKNTAYLQMNNLKTEDTAVYYCVRHGNFGNSYVSWFAYWGQGTLVTVSSGTAEAASASGEAGRSANHTPAGLTGPPGSPAGSPTSTEEGTSESATPESGPGTSTEPSEGSAPGSPAGSPTSTEEGTSTEPSEGSAPGTSTEPSEGSAPGTSESATPESGPGSEPATSGSETPGSEPATSGSETPGSPAGSPTSTEEGTSESATPESGPGTSTEPSEGSAPGTSTEPSEGSAPGSPAGSPTSTEEGTSTEPSEGSAPGTSTEPSEGSAPGTSESATPESGPGTSTEPSEGSAPGTSESATPESGPGSEPATSGSETPGTSTEPSEGSAPGTSTEPSEGSAPGTSESATPESGPGTSESATPEGAAEPEA

SEQ ID NO: 1090 - protein, 1175 aa, Artificial Sequence
  Description of Artificial Sequence: Synthetic polypeptide
HHHHHHSPAGSPTSTEEGTSESATPESGPGTSTEPSEGSAPGTSESATPESGPGSEPATSGSETPGTSESATPESGPGSEPATSGSETPGTSESATPESGPGTSTEPSEGSAPGSPAGSPTSTEEGTSESATPESGPGSEPATSGSETPGTSESATPESGPGSPAGSPTSTEEGSPAGSPTSTEEGTSTEPSEGSAPGTSESATPESGPGTSESATPESGPGTSESATPESGPGSEPATSGSETPGSEPATSGSETPGSPAGSPTSTEEGTSTEPSEGSAPGTSTEPSEGSAPGGSAPEAGRSANHTPAGLTGPATSGSETPGTDIQMTQSPSSLSASVGDRVTITCKASQDVSIGVAWYQQKPGKAPKLLIYSASYRYTGVPSRFSGSGSGTDFTLTISSLQPEDFATYYCQQYYIYPYTFGQGTKVEIKGATPPETGAETESPGETTGGSAESEPPGEGEVQLVESGGGLVQPGGSLRLSCAASGFTFTDYTMDWVRQAPGKGLEWVADVNPNSGGSIYNQRFKGRFTLSVDRSKNTLYLQMNSLRAEDTAVYYCARNLGPSFYFDYWGQGTLVTVSSGGGGSELVVTQEPSLTVSPGGTVTLTCRSSNGEVTTSNYANWVQQKPGQAPRGLIGGTIKRAPGTPARFSGSLLGGKAALTLSGVQPEDEAVYYCALWYPNLWVFGGGTKLTVLGATPPETGAETESPGETTGGSAESEPPGEGEVQLLESGGGIVQPGGSLKLSCAASGFTFNTYAMNWVRQAPGKGLEWVARIRSKYNNYATYYADSVKDRFTISRDDSKNTVYLQMNNLKTEDTAVYYCVRHENFGNSYVSWFAHWGQGTLVTVSSGTAEAASASGEAGRSANHTPAGLTGPPGSPAGSPTSTEEGTSESATPESGPGTSTEPSEGSAPGSPAGSPTSTEEGTSTEPSEGSAPGTSTEPSEGSAPGTSESATPESGPGSEPATSGSETPGSEPATSGSETPGSPAGSPTSTEEGTSESATPESGPGTSTEPSEGSAPGTSTEPSEGSAPGSPAGSPTSTEEGTSTEPSEGSAPGTSTEPSEGSAPGTSESATPESGPGTSTEPSEGSAPGTSESATPESGPGSEPATSGSETPGTSTEPSEGSAPGTSTEPSEGSAPGTSESATPESGPGTSESATPESGPGSPAGAAEPEA

SEQ ID NO: 1091 - protein, 1175 aa, Artificial Sequence
  Description of Artificial Sequence: Synthetic polypeptide
HHHHHHSPAGSPTSTEEGTSESATPESGPGTSTEPSEGSAPGTSESATPESGPGSEPATSGSETPGTSESATPESGPGSEPATSGSETPGTSESATPESGPGTSTEPSEGSAPGSPAGSPTSTEEGTSESATPESGPGSEPATSGSETPGTSESATPESGPGSPAGSPTSTEEGSPAGSPTSTEEGTSTEPSEGSAPGTSESATPESGPGTSESATPESGPGTSESATPESGPGSEPATSGSETPGSEPATSGSETPGSPAGSPTSTEEGTSTEPSEGSAPGTSTEPSEGSAPGGSAPEAGRSANHTPAGLTGPATSGSETPGTDIQMTQSPSSLSASVGDRVTITCKASQDVSIGVAWYQQKPGKAPKLLIYSASYRYTGVPSRFSGSGSGTDFTLTISSLQPEDFATYYCQQYYIYPYTFGQGTKVEIKGATPPETGAETESPGETTGGSAESEPPGEGEVQLVESGGGLVQPGGSLRLSCAASGFTFTDYTMDWVRQAPGKGLEWVADVNPNSGGSIYNQRFKGRFTLSVDRSKNTLYLQMNSLRAEDTAVYYCARNLGPSFYFDYWGQGTLVTVSSGGGGSELVVTQEPSHTVSPGGTVTLTCRSSTGAVTSSNYANWVQQKPGQAPRGLIGGTIKRAPGTPARFSGSLLGGKAALTLSGVQPEDEAEYYCALWYPNLWVFGGGTKLTVLGATPPETGAETESPGETTGGSAESEPPGEGEVQLLESGGGIVQPGGSLKLSCAASGFTFNTYAMNWVRQAPGKGLEWVARIRSKYNNYATYYADSVKDRFTISRDDSKNTVYLQMNNLKTEDTAVYYCVRHENFGNSYVSWFAHWGQGTLVTVSSGTAEAASASGEAGRSANHTPAGLTGPPGSPAGSPTSTEEGTSESATPESGPGTSTEPSEGSAPGSPAGSPTSTEEGTSTEPSEGSAPGTSTEPSEGSAPGTSESATPESGPGSEPATSGSETPGSEPATSGSETPGSPAGSPTSTEEGTSESATPESGPGTSTEPSEGSAPGTSTEPSEGSAPGSPAGSPTSTEEGTSTEPSEGSAPGTSTEPSEGSAPGTSESATPESGPGTSTEPSEGSAPGTSESATPESGPGSEPATSGSETPGTSTEPSEGSAPGTSTEPSEGSAPGTSESATPESGPGTSESATPESGPGSPAGAAEPEA

SEQ ID NO: 1092 - protein, 1175 aa, Artificial Sequence
  Description of Artificial Sequence: Synthetic polypeptide
HHHHHHSPAGSPTSTEEGTSESATPESGPGTSTEPSEGSAPGTSESATPESGPGSEPATSGSETPGTSESATPESGPGSEPATSGSETPGTSESATPESGPGTSTEPSEGSAPGSPAGSPTSTEEGTSESATPESGPGSEPATSGSETPGTSESATPESGPGSPAGSPTSTEEGSPAGSPTSTEEGTSTEPSEGSAPGTSESATPESGPGTSESATPESGPGTSESATPESGPGSEPATSGSETPGSEPATSGSETPGSPAGSPTSTEEGTSTEPSEGSAPGTSTEPSEGSAPGGSAPEAGRSANHTPAGLTGPATSGSETPGTDIQMTQSPSSLSASVGDRVTITCKASQDVSIGVAWYQQKPGKAPKLLIYSASYRYTGVPSRFSGSGSGTDFTLTISSLQPEDFATYYCQQYYIYPYTFGQGTKVEIKGATPPETGAETESPGETTGGSAESEPPGEGEVQLVESGGGLVQPGGSLRLSCAASGFTFTDYTMDWVRQAPGKGLEWVADVNPNSGGSIYNQRFKGRFTLSVDRSKNTLYLQMNSLRAEDTAVYYCARNLGPSFYFDYWGQGTLVTVSSGGGGSELVVTQEPSHTVSPGGTVTLTCRSSTGEVTTSNYANWVQQKPGQAPRGLIGGTIKRAPGTPARFSGSLLGGKAALTLSGVQPEDEAEYYCALWYPNLWVFGGGTKLTVLGATPPETGAETESPGETTGGSAESEPPGEGEVQLLESGGGIVQPGGSLKLSCAASGFTFNTYAMNWVRQAPGKGLEWVARIRSKYNNYATYYADSVKDRFTISRDDSKNTVYLQMNNLKTEDTAVYYCVRHENFGNSYVSWFAHWGQGTLVTVSSGTAEAASASGEAGRSANHTPAGLTGPPGSPAGSPTSTEEGTSESATPESGPGTSTEPSEGSAPGSPAGSPTSTEEGTSTEPSEGSAPGTSTEPSEGSAPGTSESATPESGPGSEPATSGSETPGSEPATSGSETPGSPAGSPTSTEEGTSESATPESGPGTSTEPSEGSAPGTSTEPSEGSAPGSPAGSPTSTEEGTSTEPSEGSAPGTSTEPSEGSAPGTSESATPESGPGTSTEPSEGSAPGTSESATPESGPGSEPATSGSETPGTSTEPSEGSAPGTSTEPSEGSAPGTSESATPESGPGTSESATPESGPGSPAGAAEPEA

SEQ ID NO: 1093 - protein, 1175 aa, Artificial Sequence
  Description of Artificial Sequence: Synthetic polypeptide
HHHHHHSPAGSPTSTEEGTSESATPESGPGTSTEPSEGSAPGTSESATPESGPGSEPATSGSETPGTSESATPESGPGSEPATSGSETPGTSESATPESGPGTSTEPSEGSAPGSPAGSPTSTEEGTSESATPESGPGSEPATSGSETPGTSESATPESGPGSPAGSPTSTEEGSPAGSPTSTEEGTSTEPSEGSAPGTSESATPESGPGTSESATPESGPGTSESATPESGPGSEPATSGSETPGSEPATSGSETPGSPAGSPTSTEEGTSTEPSEGSAPGTSTEPSEGSAPGGSAPEAGRSANHTPAGLTGPATSGSETPGTDIQMTQSPSSLSASVGDRVTITCKASQDVSIGVAWYQQKPGKAPKLLIYSASYRYTGVPSRFSGSGSGTDFTLTISSLQPEDFATYYCQQYYIYPYTFGQGTKVEIKGATPPETGAETESPGETTGGSAESEPPGEGEVQLVESGGGLVQPGGSLRLSCAASGFTFTDYTMDWVRQAPGKGLEWVADVNPNSGGSIYNQRFKGRFTLSVDRSKNTLYLQMNSLRAEDTAVYYCARNLGPSFYFDYWGQGTLVTVSSGGGGSELVVTQEPSLTVSPGGTVTLTCRSSNGAVTSSNYANWVQQKPGQAPRGLIGGTNKRAPGTPARFSGSSLGGKAALTLSGVQPEDEAVYYCALWYPNLWVFGGGTKLTVLGATPPETGAETESPGETTGGSAESEPPGEGEVQLQESGGGIVQPGGSLKLSCAASGFTFNTYAMNWVRQAPGKGLEWVARIRSKYNNYATYYADSVKDRFTISRDDSKNTVYLQMNNLKTEDTAVYYCVRHENFGNSYVSWFAHWGQGTLVTVSSGTAEAASASGEAGRSANHTPAGLTGPPGSPAGSPTSTEEGTSESATPESGPGTSTEPSEGSAPGSPAGSPTSTEEGTSTEPSEGSAPGTSTEPSEGSAPGTSESATPESGPGSEPATSGSETPGSEPATSGSETPGSPAGSPTSTEEGTSESATPESGPGTSTEPSEGSAPGTSTEPSEGSAPGSPAGSPTSTEEGTSTEPSEGSAPGTSTEPSEGSAPGTSESATPESGPGTSTEPSEGSAPGTSESATPESGPGSEPATSGSETPGTSTEPSEGSAPGTSTEPSEGSAPGTSESATPESGPGTSESATPESGPGSPAGAAEPEA

SEQ ID NO: 1094 - protein, 1175 aa, Artificial Sequence
  Description of Artificial Sequence: Synthetic polypeptide
HHHHHHSPAGSPTSTEEGTSESATPESGPGTSTEPSEGSAPGTSESATPESGPGSEPATSGSETPGTSESATPESGPGSEPATSGSETPGTSESATPESGPGTSTEPSEGSAPGSPAGSPTSTEEGTSESATPESGPGSEPATSGSETPGTSESATPESGPGSPAGSPTSTEEGSPAGSPTSTEEGTSTEPSEGSAPGTSESATPESGPGTSESATPESGPGTSESATPESGPGSEPATSGSETPGSEPATSGSETPGSPAGSPTSTEEGTSTEPSEGSAPGTSTEPSEGSAPGGSAPEAGRSANHTPAGLTGPATSGSETPGTDIQMTQSPSSLSASVGDRVTITCKASQDVSIGVAWYQQKPGKAPKLLIYSASYRYTGVPSRFSGSGSGTDFTLTISSLQPEDFATYYCQQYYIYPYTFGQGTKVEIKGATPPETGAETESPGETTGGSAESEPPGEGEVQLVESGGGLVQPGGSLRLSCAASGFTFTDYTMDWVRQAPGKGLEWVADVNPNSGGSIYNQRFKGRFTLSVDRSKNTLYLQMNSLRAEDTAVYYCARNLGPSFYFDYWGQGTLVTVSSGGGGSELVVTQEPSLTVSPGGTVTLTCRSSNGAVTSSNYANWVQQKPGQAPRGLIGGTNKRAPGTPARFSGSLLGGSAALTLSGVQPEDEAVYYCALWYPNLWVFGGGTKLTVLGATPPETGAETESPGETTGGSAESEPPGEGEVQLQESGGGIVQPGGSLKLSCAASGFTFNTYAMNWVRQAPGKGLEWVARIRSKYNNYATYYADSVKDRFTISRDDSKNTVYLQMNNLKTEDTAVYYCVRHENFGNSYVSWFAHWGQGTLVTVSSGTAEAASASGEAGRSANHTPAGLTGPPGSPAGSPTSTEEGTSESATPESGPGTSTEPSEGSAPGSPAGSPTSTEEGTSTEPSEGSAPGTSTEPSEGSAPGTSESATPESGPGSEPATSGSETPGSEPATSGSETPGSPAGSPTSTEEGTSESATPESGPGTSTEPSEGSAPGTSTEPSEGSAPGSPAGSPTSTEEGTSTEPSEGSAPGTSTEPSEGSAPGTSESATPESGPGTSTEPSEGSAPGTSESATPESGPGSEPATSGSETPGTSTEPSEGSAPGTSTEPSEGSAPGTSESATPESGPGTSESATPESGPGSPAGAAEPEA

SEQ ID NO: 1095 - protein, 1175 aa, Artificial Sequence
  Description of Artificial Sequence: Synthetic polypeptide
HHHHHHSPAGSPTSTEEGTSESATPESGPGTSTEPSEGSAPGTSESATPESGPGSEPATSGSETPGTSESATPESGPGSEPATSGSETPGTSESATPESGPGTSTEPSEGSAPGSPAGSPTSTEEGTSESATPESGPGSEPATSGSETPGTSESATPESGPGSPAGSPTSTEEGSPAGSPTSTEEGTSTEPSEGSAPGTSESATPESGPGTSESATPESGPGTSESATPESGPGSEPATSGSETPGSEPATSGSETPGSPAGSPTSTEEGTSTEPSEGSAPGTSTEPSEGSAPGGSAPEAGRSANHTPAGLTGPATSGSETPGTDIQMTQSPSSLSASVGDRVTITCKASQDVSIGVAWYQQKPGKAPKLLIYSASYRYTGVPSRFSGSGSGTDFTLTISSLQPEDFATYYCQQYYIYPYTFGQGTKVEIKGATPPETGAETESPGETTGGSAESEPPGEGEVQLVESGGGLVQPGGSLRLSCAASGFTFTDYTMDWVRQAPGKGLEWVADVNPNSGGSIYNQRFKGRFTLSVDRSKNTLYLQMNSLRAEDTAVYYCARNLGPSFYFDYWGQGTLVTVSSGGGGSELVVTQEPSLTVSPGGTVTLTCRSSNGAVTSSNYANWVQQKPGQAPRGLIGGTNKRAPGTPARFSGSSLGGSAALTLSGVQPEDEAVYYCALWYPNLWVFGGGTKLTVLGATPPETGAETESPGETTGGSAESEPPGEGEVQLQESGGGIVQPGGSLKLSCAASGFTFNTYAMNWVRQAPGKGLEWVARIRSKYNNYATYYADSVKDRFTISRDDSKNTVYLQMNNLKTEDTAVYYCVRHENFGNSYVSWFAHWGQGTLVTVSSGTAEAASASGEAGRSANHTPAGLTGPPGSPAGSPTSTEEGTSESATPESGPGTSTEPSEGSAPGSPAGSPTSTEEGTSTEPSEGSAPGTSTEPSEGSAPGTSESATPESGPGSEPATSGSETPGSEPATSGSETPGSPAGSPTSTEEGTSESATPESGPGTSTEPSEGSAPGTSTEPSEGSAPGSPAGSPTSTEEGTSTEPSEGSAPGTSTEPSEGSAPGTSESATPESGPGTSTEPSEGSAPGTSESATPESGPGSEPATSGSETPGTSTEPSEGSAPGTSTEPSEGSAPGTSESATPESGPGTSESATPESGPGSPAGAAEPEA

SEQ ID NO: 1096 - protein, 1175 aa, Artificial Sequence
  Description of Artificial Sequence: Synthetic polypeptide
HHHHHHSPAGSPTSTEEGTSESATPESGPGTSTEPSEGSAPGTSESATPESGPGSEPATSGSETPGTSESATPESGPGSEPATSGSETPGTSESATPESGPGTSTEPSEGSAPGSPAGSPTSTEEGTSESATPESGPGSEPATSGSETPGTSESATPESGPGSPAGSPTSTEEGSPAGSPTSTEEGTSTEPSEGSAPGTSESATPESGPGTSESATPESGPGTSESATPESGPGSEPATSGSETPGSEPATSGSETPGSPAGSPTSTEEGTSTEPSEGSAPGTSTEPSEGSAPGGSAPEAGRSANHTPAGLTGPATSGSETPGTDIQMTQSPSSLSASVGDRVTITCKASQDVSIGVAWYQQKPGKAPKLLIYSASYRYTGVPSRFSGSGSGTDFTLTISSLQPEDFATYYCQQYYIYPYTFGQGTKVEIKGATPPETGAETESPGETTGGSAESEPPGEGEVQLVESGGGLVQPGGSLRLSCAASGFTFTDYTMDWVRQAPGKGLEWVADVNPNSGGSIYNQRFKGRFTLSVDRSKNTLYLQMNSLRAEDTAVYYCARNLGPSFYFDYWGQGTLVTVSSGGGGSELVVTQEPSLTVSPGGTVTLTCRSSTGAVTTSNYANWVQQKPGQAPRGLIGGTNKRAPGTPARFSGSSLGGSAALTLSGVQPEDEAEYYCALWYSNLWVFGGGTKLTVLGATPPETGAETESPGETTGGSAESEPPGEGEVQLQESGGGLVQPGGSLKLSCAASGFTFNTYAMNWVRQAPGKGLEWVARIRSKYNNYATYYADSVKDRFTISRDDSKNTAYLQMNNLKTEDTAVYYCVRHGNFGNSYVSWFAYWGQGTLVTVSSGTAEAASASGEAGRSANHTPAGLTGPPGSPAGSPTSTEEGTSESATPESGPGTSTEPSEGSAPGSPAGSPTSTEEGTSTEPSEGSAPGTSTEPSEGSAPGTSESATPESGPGSEPATSGSETPGSEPATSGSETPGSPAGSPTSTEEGTSESATPESGPGTSTEPSEGSAPGTSTEPSEGSAPGSPAGSPTSTEEGTSTEPSEGSAPGTSTEPSEGSAPGTSESATPESGPGTSTEPSEGSAPGTSESATPESGPGSEPATSGSETPGTSTEPSEGSAPGTSTEPSEGSAPGTSESATPESGPGTSESATPESGPGSPAGAAEPEA

SEQ ID NO: 1097 - protein, 1459 aa, Artificial Sequence
  Description of Artificial Sequence: Synthetic polypeptide
HHHHHHSPAGSPTSTEEGTSESATPESGPGTSTEPSEGSAPGTSESATPESGPGSEPATSGSETPGTSESATPESGPGSEPATSGSETPGTSESATPESGPGTSTEPSEGSAPGSPAGSPTSTEEGTSESATPESGPGSEPATSGSETPGTSESATPESGPGSPAGSPTSTEEGSPAGSPTSTEEGTSTEPSEGSAPGTSESATPESGPGTSESATPESGPGTSESATPESGPGSEPATSGSETPGSEPATSGSETPGSPAGSPTSTEEGTSTEPSEGSAPGTSTEPSEGSAPGGSAPEAGRSANHTPAGLTGPATSGSETPGTDIQMTQSPSSLSASVGDRVTITCKASQDVSIGVAWYQQKPGKAPKLLIYSASYRYTGVPSRFSGSGSGTDFTLTISSLQPEDFATYYCQQYYIYPYTFGQGTKVEIKGATPPETGAETESPGETTGGSAESEPPGEGEVQLVESGGGLVQPGGSLRLSCAASGFTFTDYTMDWVRQAPGKGLEWVADVNPNSGGSIYNQRFKGRFTLSVDRSKNTLYLQMNSLRAEDTAVYYCARNLGPSFYFDYWGQGTLVTVSSGGGGSELVVTQEPSLTVSPGGTVTLTCRSSNGEVTTSNYANWVQQKPGQAPRGLIGGTIKRAPGTPARFSGSLLGGKAALTLSGVQPEDEAVYYCALWYPNLWVFGGGTKLTVLGATPPETGAETESPGETTGGSAESEPPGEGEVQLLESGGGIVQPGGSLKLSCAASGFTFNTYAMNWVRQAPGKGLEWVARIRSKYNNYATYYADSVKDRFTISRDDSKNTVYLQMNNLKTEDTAVYYCVRHENFGNSYVSWFAHWGQGTLVTVSSGTAEAASASGEAGRSANHTPAGLTGPPGSPAGSPTSTEEGTSESATPESGPGTSTEPSEGSAPGSPAGSPTSTEEGTSTEPSEGSAPGTSTEPSEGSAPGTSESATPESGPGSEPATSGSETPGSEPATSGSETPGSPAGSPTSTEEGTSESATPESGPGTSTEPSEGSAPGTSTEPSEGSAPGSPAGSPTSTEEGTSTEPSEGSAPGTSTEPSEGSAPGTSESATPESGPGTSTEPSEGSAPGTSESATPESGPGSEPATSGSETPGTSTEPSEGSAPGTSTEPSEGSAPGTSESATPESGPGTSESATPESGPGSPAGSPTSTEEGTSESATPESGPGSEPATSGSETPGTSESATPESGPGTSTEPSEGSAPGTSTEPSEGSAPGTSTEPSEGSAPGTSTEPSEGSAPGTSTEPSEGSAPGTSTEPSEGSAPGSPAGSPTSTEEGTSTEPSEGSAPGTSESATPESGPGSEPATSGSETPGTSESATPESGPGSEPATSGSETPGTSESATPESGPGTSTEPSEGSAPGTSESATPESGPGSPAGSPTSTEEGSPAGSPTSTEEGSPAGSPTSTEEGTSESATPESGPGTSTEPSEGSAPGAAEPEA

SEQ ID NO: 1098 - protein, 1459 aa, Artificial Sequence
  Description of Artificial Sequence: Synthetic polypeptide
HHHHHHSPAGSPTSTEEGTSESATPESGPGTSTEPSEGSAPGTSESATPESGPGSEPATSGSETPGTSESATPESGPGSEPATSGSETPGTSESATPESGPGTSTEPSEGSAPGSPAGSPTSTEEGTSESATPESGPGSEPATSGSETPGTSESATPESGPGSPAGSPTSTEEGSPAGSPTSTEEGTSTEPSEGSAPGTSESATPESGPGTSESATPESGPGTSESATPESGPGSEPATSGSETPGSEPATSGSETPGSPAGSPTSTEEGTSTEPSEGSAPGTSTEPSEGSAPGGSAPEAGRSANHTPAGLTGPATSGSETPGTDIQMTQSPSSLSASVGDRVTITCKASQDVSIGVAWYQQKPGKAPKLLIYSASYRYTGVPSRFSGSGSGTDFTLTISSLQPEDFATYYCQQYYIYPYTFGQGTKVEIKGATPPETGAETESPGETTGGSAESEPPGEGEVQLVESGGGLVQPGGSLRLSCAASGFTFTDYTMDWVRQAPGKGLEWVADVNPNSGGSIYNQRFKGRFTLSVDRSKNTLYLQMNSLRAEDTAVYYCARNLGPSFYFDYWGQGTLVTVSSGGGGSELVVTQEPSHTVSPGGTVTLTCRSSTGAVTSSNYANWVQQKPGQAPRGLIGGTIKRAPGTPARFSGSLLGGKAALTLSGVQPEDEAEYYCALWYPNLWVFGGGTKLTVLGATPPETGAETESPGETTGGSAESEPPGEGEVQLLESGGGIVQPGGSLKLSCAASGFTFNTYAMNWVRQAPGKGLEWVARIRSKYNNYATYYADSVKDRFTISRDDSKNTVYLQMNNLKTEDTAVYYCVRHENFGNSYVSWFAHWGQGTLVTVSSGTAEAASASGEAGRSANHTPAGLTGPPGSPAGSPTSTEEGTSESATPESGPGTSTEPSEGSAPGSPAGSPTSTEEGTSTEPSEGSAPGTSTEPSEGSAPGTSESATPESGPGSEPATSGSETPGSEPATSGSETPGSPAGSPTSTEEGTSESATPESGPGTSTEPSEGSAPGTSTEPSEGSAPGSPAGSPTSTEEGTSTEPSEGSAPGTSTEPSEGSAPGTSESATPESGPGTSTEPSEGSAPGTSESATPESGPGSEPATSGSETPGTSTEPSEGSAPGTSTEPSEGSAPGTSESATPESGPGTSESATPESGPGSPAGSPTSTEEGTSESATPESGPGSEPATSGSETPGTSESATPESGPGTSTEPSEGSAPGTSTEPSEGSAPGTSTEPSEGSAPGTSTEPSEGSAPGTSTEPSEGSAPGTSTEPSEGSAPGSPAGSPTSTEEGTSTEPSEGSAPGTSESATPESGPGSEPATSGSETPGTSESATPESGPGSEPATSGSETPGTSESATPESGPGTSTEPSEGSAPGTSESATPESGPGSPAGSPTSTEEGSPAGSPTSTEEGSPAGSPTSTEEGTSESATPESGPGTSTEPSEGSAPGAAEPEA

SEQ ID NO: 1099 - protein, 1459 aa, Artificial Sequence
  Description of Artificial Sequence: Synthetic polypeptide
HHHHHHSPAGSPTSTEEGTSESATPESGPGTSTEPSEGSAPGTSESATPESGPGSEPATSGSETPGTSESATPESGPGSEPATSGSETPGTSESATPESGPGTSTEPSEGSAPGSPAGSPTSTEEGTSESATPESGPGSEPATSGSETPGTSESATPESGPGSPAGSPTSTEEGSPAGSPTSTEEGTSTEPSEGSAPGTSESATPESGPGTSESATPESGPGTSESATPESGPGSEPATSGSETPGSEPATSGSETPGSPAGSPTSTEEGTSTEPSEGSAPGTSTEPSEGSAPGGSAPEAGRSANHTPAGLTGPATSGSETPGTDIQMTQSPSSLSASVGDRVTITCKASQDVSIGVAWYQQKPGKAPKLLIYSASYRYTGVPSRFSGSGSGTDFTLTISSLQPEDFATYYCQQYYIYPYTFGQGTKVEIKGATPPETGAETESPGETTGGSAESEPPGEGEVQLVESGGGLVQPGGSLRLSCAASGFTFTDYTMDWVRQAPGKGLEWVADVNPNSGGSIYNQRFKGRFTLSVDRSKNTLYLQMNSLRAEDTAVYYCARNLGPSFYFDYWGQGTLVTVSSGGGGSELVVTQEPSHTVSPGGTVTLTCRSSTGEVTTSNYANWVQQKPGQAPRGLIGGTIKRAPGTPARFSGSLLGGKAALTLSGVQPEDEAEYYCALWYPNLWVFGGGTKLTVLGATPPETGAETESPGETTGGSAESEPPGEGEVQLLESGGGIVQPGGSLKLSCAASGFTFNTYAMNWVRQAPGKGLEWVARIRSKYNNYATYYADSVKDRFTISRDDSKNTVYLQMNNLKTEDTAVYYCVRHENFGNSYVSWFAHWGQGTLVTVSSGTAEAASASGEAGRSANHTPAGLTGPPGSPAGSPTSTEEGTSESATPESGPGTSTEPSEGSAPGSPAGSPTSTEEGTSTEPSEGSAPGTSTEPSEGSAPGTSESATPESGPGSEPATSGSETPGSEPATSGSETPGSPAGSPTSTEEGTSESATPESGPGTSTEPSEGSAPGTSTEPSEGSAPGSPAGSPTSTEEGTSTEPSEGSAPGTSTEPSEGSAPGTSESATPESGPGTSTEPSEGSAPGTSESATPESGPGSEPATSGSETPGTSTEPSEGSAPGTSTEPSEGSAPGTSESATPESGPGTSESATPESGPGSPAGSPTSTEEGTSESATPESGPGSEPATSGSETPGTSESATPESGPGTSTEPSEGSAPGTSTEPSEGSAPGTSTEPSEGSAPGTSTEPSEGSAPGTSTEPSEGSAPGTSTEPSEGSAPGSPAGSPTSTEEGTSTEPSEGSAPGTSESATPESGPGSEPATSGSETPGTSESATPESGPGSEPATSGSETPGTSESATPESGPGTSTEPSEGSAPGTSESATPESGPGSPAGSPTSTEEGSPAGSPTSTEEGSPAGSPTSTEEGTSESATPESGPGTSTEPSEGSAPGAAEPEA

SEQ ID NO: 1100 - protein, 1459 aa, Artificial Sequence
  Description of Artificial Sequence: Synthetic polypeptide
HHHHHHSPAGSPTSTEEGTSESATPESGPGTSTEPSEGSAPGTSESATPESGPGSEPATSGSETPGTSESATPESGPGSEPATSGSETPGTSESATPESGPGTSTEPSEGSAPGSPAGSPTSTEEGTSESATPESGPGSEPATSGSETPGTSESATPESGPGSPAGSPTSTEEGSPAGSPTSTEEGTSTEPSEGSAPGTSESATPESGPGTSESATPESGPGTSESATPESGPGSEPATSGSETPGSEPATSGSETPGSPAGSPTSTEEGTSTEPSEGSAPGTSTEPSEGSAPGGSAPEAGRSANHTPAGLTGPATSGSETPGTDIQMTQSPSSLSASVGDRVTITCKASQDVSIGVAWYQQKPGKAPKLLIYSASYRYTGVPSRFSGSGSGTDFTLTISSLQPEDFATYYCQQYYIYPYTFGQGTKVEIKGATPPETGAETESPGETTGGSAESEPPGEGEVQLVESGGGLVQPGGSLRLSCAASGFTFTDYTMDWVRQAPGKGLEWVADVNPNSGGSIYNQRFKGRFTLSVDRSKNTLYLQMNSLRAEDTAVYYCARNLGPSFYFDYWGQGTLVTVSSGGGGSELVVTQEPSLTVSPGGTVTLTCRSSNGAVTSSNYANWVQQKPGQAPRGLIGGTNKRAPGTPARFSGSSLGGKAALTLSGVQPEDEAVYYCALWYPNLWVFGGGTKLTVLGATPPETGAETESPGETTGGSAESEPPGEGEVQLQESGGGIVQPGGSLKLSCAASGFTFNTYAMNWVRQAPGKGLEWVARIRSKYNNYATYYADSVKDRFTISRDDSKNTVYLQMNNLKTEDTAVYYCVRHENFGNSYVSWFAHWGQGTLVTVSSGTAEAASASGEAGRSANHTPAGLTGPPGSPAGSPTSTEEGTSESATPESGPGTSTEPSEGSAPGSPAGSPTSTEEGTSTEPSEGSAPGTSTEPSEGSAPGTSESATPESGPGSEPATSGSETPGSEPATSGSETPGSPAGSPTSTEEGTSESATPESGPGTSTEPSEGSAPGTSTEPSEGSAPGSPAGSPTSTEEGTSTEPSEGSAPGTSTEPSEGSAPGTSESATPESGPGTSTEPSEGSAPGTSESATPESGPGSEPATSGSETPGTSTEPSEGSAPGTSTEPSEGSAPGTSESATPESGPGTSESATPESGPGSPAGSPTSTEEGTSESATPESGPGSEPATSGSETPGTSESATPESGPGTSTEPSEGSAPGTSTEPSEGSAPGTSTEPSEGSAPGTSTEPSEGSAPGTSTEPSEGSAPGTSTEPSEGSAPGSPAGSPTSTEEGTSTEPSEGSAPGTSESATPESGPGSEPATSGSETPGTSESATPESGPGSEPATSGSETPGTSESATPESGPGTSTEPSEGSAPGTSESATPESGPGSPAGSPTSTEEGSPAGSPTSTEEGSPAGSPTSTEEGTSESATPESGPGTSTEPSEGSAPGAAEPEA

SEQ ID NO: 1101 - protein, 1459 aa, Artificial Sequence
  Description of Artificial Sequence: Synthetic polypeptide
HHHHHHSPAGSPTSTEEGTSESATPESGPGTSTEPSEGSAPGTSESATPESGPGSEPATSGSETPGTSESATPESGPGSEPATSGSETPGTSESATPESGPGTSTEPSEGSAPGSPAGSPTSTEEGTSESATPESGPGSEPATSGSETPGTSESATPESGPGSPAGSPTSTEEGSPAGSPTSTEEGTSTEPSEGSAPGTSESATPESGPGTSESATPESGPGTSESATPESGPGSEPATSGSETPGSEPATSGSETPGSPAGSPTSTEEGTSTEPSEGSAPGTSTEPSEGSAPGGSAPEAGRSANHTPAGLTGPATSGSETPGTDIQMTQSPSSLSASVGDRVTITCKASQDVSIGVAWYQQKPGKAPKLLIYSASYRYTGVPSRFSGSGSGTDFTLTISSLQPEDFATYYCQQYYIYPYTFGQGTKVEIKGATPPETGAETESPGETTGGSAESEPPGEGEVQLVESGGGLVQPGGSLRLSCAASGFTFTDYTMDWVRQAPGKGLEWVADVNPNSGGSIYNQRFKGRFTLSVDRSKNTLYLQMNSLRAEDTAVYYCARNLGPSFYFDYWGQGTLVTVSSGGGGSELVVTQEPSLTVSPGGTVTLTCRSSNGAVTSSNYANWVQQKPGQAPRGLIGGTNKRAPGTPARFSGSLLGGSAALTLSGVQPEDEAVYYCALWYPNLWVFGGGTKLTVLGATPPETGAETESPGETTGGSAESEPPGEGEVQLQESGGGIVQPGGSLKLSCAASGFTFNTYAMNWVRQAPGKGLEWVARIRSKYNNYATYYADSVKDRFTISRDDSKNTVYLQMNNLKTEDTAVYYCVRHENFGNSYVSWFAHWGQGTLVTVSSGTAEAASASGEAGRSANHTPAGLTGPPGSPAGSPTSTEEGTSESATPESGPGTSTEPSEGSAPGSPAGSPTSTEEGTSTEPSEGSAPGTSTEPSEGSAPGTSESATPESGPGSEPATSGSETPGSEPATSGSETPGSPAGSPTSTEEGTSESATPESGPGTSTEPSEGSAPGTSTEPSEGSAPGSPAGSPTSTEEGTSTEPSEGSAPGTSTEPSEGSAPGTSESATPESGPGTSTEPSEGSAPGTSESATPESGPGSEPATSGSETPGTSTEPSEGSAPGTSTEPSEGSAPGTSESATPESGPGTSESATPESGPGSPAGSPTSTEEGTSESATPESGPGSEPATSGSETPGTSESATPESGPGTSTEPSEGSAPGTSTEPSEGSAPGTSTEPSEGSAPGTSTEPSEGSAPGTSTEPSEGSAPGTSTEPSEGSAPGSPAGSPTSTEEGTSTEPSEGSAPGTSESATPESGPGSEPATSGSETPGTSESATPESGPGSEPATSGSETPGTSESATPESGPGTSTEPSEGSAPGTSESATPESGPGSPAGSPTSTEEGSPAGSPTSTEEGSPAGSPTSTEEGTSESATPESGPGTSTEPSEGSAPGAAEPEA

SEQ ID NO: 1102 - protein, 1459 aa, Artificial Sequence
  Description of Artificial Sequence: Synthetic polypeptide
HHHHHHSPAGSPTSTEEGTSESATPESGPGTSTEPSEGSAPGTSESATPESGPGSEPATSGSETPGTSESATPESGPGSEPATSGSETPGTSESATPESGPGTSTEPSEGSAPGSPAGSPTSTEEGTSESATPESGPGSEPATSGSETPGTSESATPESGPGSPAGSPTSTEEGSPAGSPTSTEEGTSTEPSEGSAPGTSESATPESGPGTSESATPESGPGTSESATPESGPGSEPATSGSETPGSEPATSGSETPGSPAGSPTSTEEGTSTEPSEGSAPGTSTEPSEGSAPGGSAPEAGRSANHTPAGLTGPATSGSETPGTDIQMTQSPSSLSASVGDRVTITCKASQDVSIGVAWYQQKPGKAPKLLIYSASYRYTGVPSRFSGSGSGTDFTLTISSLQPEDFATYYCQQYYIYPYTFGQGTKVEIKGATPPETGAETESPGETTGGSAESEPPGEGEVQLVESGGGLVQPGGSLRLSCAASGFTFTDYTMDWVRQAPGKGLEWVADVNPNSGGSIYNQRFKGRFTLSVDRSKNTLYLQMNSLRAEDTAVYYCARNLGPSFYFDYWGQGTLVTVSSGGGGSELVVTQEPSLTVSPGGTVTLTCRSSNGAVTSSNYANWVQQKPGQAPRGLIGGTNKRAPGTPARFSGSSLGGSAALTLSGVQPEDEAVYYCALWYPNLWVFGGGTKLTVLGATPPETGAETESPGETTGGSAESEPPGEGEVQLQESGGGIVQPGGSLKLSCAASGFTFNTYAMNWVRQAPGKGLEWVARIRSKYNNYATYYADSVKDRFTISRDDSKNTVYLQMNNLKTEDTAVYYCVRHENFGNSYVSWFAHWGQGTLVTVSSGTAEAASASGEAGRSANHTPAGLTGPPGSPAGSPTSTEEGTSESATPESGPGTSTEPSEGSAPGSPAGSPTSTEEGTSTEPSEGSAPGTSTEPSEGSAPGTSESATPESGPGSEPATSGSETPGSEPATSGSETPGSPAGSPTSTEEGTSESATPESGPGTSTEPSEGSAPGTSTEPSEGSAPGSPAGSPTSTEEGTSTEPSEGSAPGTSTEPSEGSAPGTSESATPESGPGTSTEPSEGSAPGTSESATPESGPGSEPATSGSETPGTSTEPSEGSAPGTSTEPSEGSAPGTSESATPESGPGTSESATPESGPGSPAGSPTSTEEGTSESATPESGPGSEPATSGSETPGTSESATPESGPGTSTEPSEGSAPGTSTEPSEGSAPGTSTEPSEGSAPGTSTEPSEGSAPGTSTEPSEGSAPGTSTEPSEGSAPGSPAGSPTSTEEGTSTEPSEGSAPGTSESATPESGPGSEPATSGSETPGTSESATPESGPGSEPATSGSETPGTSESATPESGPGTSTEPSEGSAPGTSESATPESGPGSPAGSPTSTEEGSPAGSPTSTEEGSPAGSPTSTEEGTSESATPESGPGTSTEPSEGSAPGAAEPEA

SEQ ID NO: 1103 - protein, 1459 aa, Artificial Sequence
  Description of Artificial Sequence: Synthetic polypeptide
HHHHHHSPAGSPTSTEEGTSESATPESGPGTSTEPSEGSAPGTSESATPESGPGSEPATSGSETPGTSESATPESGPGSEPATSGSETPGTSESATPESGPGTSTEPSEGSAPGSPAGSPTSTEEGTSESATPESGPGSEPATSGSETPGTSESATPESGPGSPAGSPTSTEEGSPAGSPTSTEEGTSTEPSEGSAPGTSESATPESGPGTSESATPESGPGTSESATPESGPGSEPATSGSETPGSEPATSGSETPGSPAGSPTSTEEGTSTEPSEGSAPGTSTEPSEGSAPGGSAPEAGRSANHTPAGLTGPATSGSETPGTDIQMTQSPSSLSASVGDRVTITCKASQDVSIGVAWYQQKPGKAPKLLIYSASYRYTGVPSRFSGSGSGTDFTLTISSLQPEDFATYYCQQYYIYPYTFGQGTKVEIKGATPPETGAETESPGETTGGSAESEPPGEGEVQLVESGGGLVQPGGSLRLSCAASGFTFTDYTMDWVRQAPGKGLEWVADVNPNSGGSIYNQRFKGRFTLSVDRSKNTLYLQMNSLRAEDTAVYYCARNLGPSFYFDYWGQGTLVTVSSGGGGSELVVTQEPSLTVSPGGTVTLTCRSSTGAVTTSNYANWVQQKPGQAPRGLIGGTNKRAPGTPARFSGSSLGGSAALTLSGVQPEDEAEYYCALWYSNLWVFGGGTKLTVLGATPPETGAETESPGETTGGSAESEPPGEGEVQLQESGGGLVQPGGSLKLSCAASGFTFNTYAMNWVRQAPGKGLEWVARIRSKYNNYATYYADSVKDRFTISRDDSKNTAYLQMNNLKTEDTAVYYCVRHGNFGNSYVSWFAYWGQGTLVTVSSGTAEAASASGEAGRSANHTPAGLTGPPGSPAGSPTSTEEGTSESATPESGPGTSTEPSEGSAPGSPAGSPTSTEEGTSTEPSEGSAPGTSTEPSEGSAPGTSESATPESGPGSEPATSGSETPGSEPATSGSETPGSPAGSPTSTEEGTSESATPESGPGTSTEPSEGSAPGTSTEPSEGSAPGSPAGSPTSTEEGTSTEPSEGSAPGTSTEPSEGSAPGTSESATPESGPGTSTEPSEGSAPGTSESATPESGPGSEPATSGSETPGTSTEPSEGSAPGTSTEPSEGSAPGTSESATPESGPGTSESATPESGPGSPAGSPTSTEEGTSESATPESGPGSEPATSGSETPGTSESATPESGPGTSTEPSEGSAPGTSTEPSEGSAPGTSTEPSEGSAPGTSTEPSEGSAPGTSTEPSEGSAPGTSTEPSEGSAPGSPAGSPTSTEEGTSTEPSEGSAPGTSESATPESGPGSEPATSGSETPGTSESATPESGPGSEPATSGSETPGTSESATPESGPGTSTEPSEGSAPGTSESATPESGPGSPAGSPTSTEEGSPAGSPTSTEEGSPAGSPTSTEEGTSESATPESGPGTSTEPSEGSAPGAAEPEA

SEQ ID NO: 1104 - protein, 1745 aa, Artificial Sequence
  Description of Artificial Sequence: Synthetic polypeptide
HHHHHHSPAGSPTSTEEGTSESATPESGPGTSTEPSEGSAPGTSESATPESGPGSEPATSGSETPGTSESATPESGPGSEPATSGSETPGTSESATPESGPGTSTEPSEGSAPGSPAGSPTSTEEGTSESATPESGPGSEPATSGSETPGTSESATPESGPGSPAGSPTSTEEGSPAGSPTSTEEGTSTEPSEGSAPGTSESATPESGPGTSESATPESGPGTSESATPESGPGSEPATSGSETPGSEPATSGSETPGSPAGSPTSTEEGTSTEPSEGSAPGTSTEPSEGSAPGGSAPEAGRSANHTPAGLTGPATSGSETPGTDIQMTQSPSSLSASVGDRVTITCRSTKSLLHSNGITYLYWYQQKPGKAPKLLIYQMSNLASGVPSRFSSSGSGTDFTLTISSLQPEDFATYYCAQNLEIPRTFGQGTKVEIKGATPPETGAETESPGETTGGSAESEPPGEGQVQLVQSGPGLVQPGGSVRISCAASGYTFTNYGMNWVKQAPGKGLEWMGWINTYTGESTYADSFKGRFTFSLDTSASAAYLQINSLRAEDTAVYYCARFAIKGDYWGQGTLLTVSSGGGGSELVVTQEPSLTVSPGGTVTLTCRSSNGAVTSSNYANWVQQKPGQAPRGLIGGTNKRAPGTPARFSGSLLGGKAALTLSGVQPEDEAVYYCALWYPNLWVFGGGTKLTVLGATPPETGAETESPGETTGGSAESEPPGEGEVQLLESGGGIVQPGGSLKLSCAASGFTFNTYAMNWVRQAPGKGLEWVARIRSKYNNYATYYADSVKDRFTISRDDSKNTVYLQMNNLKTEDTAVYYCVRHENFGNSYVSWFAHWGQGTLVTVSSGTAEAASASGEAGRSANHTPAGLTGPPGSPAGSPTSTEEGTSESATPESGPGTSTEPSEGSAPGSPAGSPTSTEEGTSTEPSEGSAPGTSTEPSEGSAPGTSESATPESGPGSEPATSGSETPGSEPATSGSETPGSPAGSPTSTEEGTSESATPESGPGTSTEPSEGSAPGTSTEPSEGSAPGSPAGSPTSTEEGTSTEPSEGSAPGTSTEPSEGSAPGTSESATPESGPGTSTEPSEGSAPGTSESATPESGPGSEPATSGSETPGTSTEPSEGSAPGTSTEPSEGSAPGTSESATPESGPGTSESATPESGPGSPAGSPTSTEEGTSESATPESGPGSEPATSGSETPGTSESATPESGPGTSTEPSEGSAPGTSTEPSEGSAPGTSTEPSEGSAPGTSTEPSEGSAPGTSTEPSEGSAPGTSTEPSEGSAPGSPAGSPTSTEEGTSTEPSEGSAPGTSESATPESGPGSEPATSGSETPGTSESATPESGPGSEPATSGSETPGTSESATPESGPGTSTEPSEGSAPGTSESATPESGPGSPAGSPTSTEEGSPAGSPTSTEEGSPAGSPTSTEEGTSESATPESGPGTSTEPSEGSAPGTSESATPESGPGSEPATSGSETPGTSESATPESGPGSEPATSGSETPGTSESATPESGPGTSTEPSEGSAPGSPAGSPTSTEEGTSESATPESGPGSEPATSGSETPGTSESATPESGPGSPAGSPTSTEEGSPAGSPTSTEEGTSTEPSEGSAPGTSESATPESGPGTSESATPESGPGTSESATPESGPGSEPATSGSETPGSEPATSGSETPGSPAGSPTSTEEGTSTEPSEGSAPGTSTEPSEGSAPGSEPATSGSETPGTSESATPESGPGTSTEPSEGAAEPEA

SEQ ID NO: 1105 - protein, 1745 aa, Artificial Sequence
  Description of Artificial Sequence: Synthetic polypeptide
HHHHHHSPAGSPTSTEEGTSESATPESGPGTSTEPSEGSAPGTSESATPESGPGSEPATSGSETPGTSESATPESGPGSEPATSGSETPGTSESATPESGPGTSTEPSEGSAPGSPAGSPTSTEEGTSESATPESGPGSEPATSGSETPGTSESATPESGPGSPAGSPTSTEEGSPAGSPTSTEEGTSTEPSEGSAPGTSESATPESGPGTSESATPESGPGTSESATPESGPGSEPATSGSETPGSEPATSGSETPGSPAGSPTSTEEGTSTEPSEGSAPGTSTEPSEGSAPGGSAPEAGRSANHTPAGLTGPATSGSETPGTDIQMTQSPSSLSASVGDRVTITCRSTKSLLHSNGITYLYWYQQKPGKAPKLLIYQMSNLASGVPSRFSSSGSGTDFTLTISSLQPEDFATYYCAQNLEIPRTFGQGTKVEIKGATPPETGAETESPGETTGGSAESEPPGEGQVQLVQSGPGLVQPGGSVRISCAASGYTFTNYGMNWVKQAPGKGLEWMGWINTYTGESTYADSFKGRFTFSLDTSASAAYLQINSLRAEDTAVYYCARFAIKGDYWGQGTLLTVSSGGGGSELVVTQEPSLTVSPGGTVTLTCRSSNGEVTTSNYANWVQQKPGQAPRGLIGGTIKRAPGTPARFSGSLLGGKAALTLSGVQPEDEAVYYCALWYPNLWVFGGGTKLTVLGATPPETGAETESPGETTGGSAESEPPGEGEVQLLESGGGIVQPGGSLKLSCAASGFTFNTYAMNWVRQAPGKGLEWVARIRSKYNNYATYYADSVKDRFTISRDDSKNTVYLQMNNLKTEDTAVYYCVRHENFGNSYVSWFAHWGQGTLVTVSSGTAEAASASGEAGRSANHTPAGLTGPPGSPAGSPTSTEEGTSESATPESGPGTSTEPSEGSAPGSPAGSPTSTEEGTSTEPSEGSAPGTSTEPSEGSAPGTSESATPESGPGSEPATSGSETPGSEPATSGSETPGSPAGSPTSTEEGTSESATPESGPGTSTEPSEGSAPGTSTEPSEGSAPGSPAGSPTSTEEGTSTEPSEGSAPGTSTEPSEGSAPGTSESATPESGPGTSTEPSEGSAPGTSESATPESGPGSEPATSGSETPGTSTEPSEGSAPGTSTEPSEGSAPGTSESATPESGPGTSESATPESGPGSPAGSPTSTEEGTSESATPESGPGSEPATSGSETPGTSESATPESGPGTSTEPSEGSAPGTSTEPSEGSAPGTSTEPSEGSAPGTSTEPSEGSAPGTSTEPSEGSAPGTSTEPSEGSAPGSPAGSPTSTEEGTSTEPSEGSAPGTSESATPESGPGSEPATSGSETPGTSESATPESGPGSEPATSGSETPGTSESATPESGPGTSTEPSEGSAPGTSESATPESGPGSPAGSPTSTEEGSPAGSPTSTEEGSPAGSPTSTEEGTSESATPESGPGTSTEPSEGSAPGTSESATPESGPGSEPATSGSETPGTSESATPESGPGSEPATSGSETPGTSESATPESGPGTSTEPSEGSAPGSPAGSPTSTEEGTSESATPESGPGSEPATSGSETPGTSESATPESGPGSPAGSPTSTEEGSPAGSPTSTEEGTSTEPSEGSAPGTSESATPESGPGTSESATPESGPGTSESATPESGPGSEPATSGSETPGSEPATSGSETPGSPAGSPTSTEEGTSTEPSEGSAPGTSTEPSEGSAPGSEPATSGSETPGTSESATPESGPGTSTEPSEGAAEPEA

SEQ ID NO: 1106 - protein, 1745 aa, Artificial Sequence
  Description of Artificial Sequence: Synthetic polypeptide
HHHHHHSPAGSPTSTEEGTSESATPESGPGTSTEPSEGSAPGTSESATPESGPGSEPATSGSETPGTSESATPESGPGSEPATSGSETPGTSESATPESGPGTSTEPSEGSAPGSPAGSPTSTEEGTSESATPESGPGSEPATSGSETPGTSESATPESGPGSPAGSPTSTEEGSPAGSPTSTEEGTSTEPSEGSAPGTSESATPESGPGTSESATPESGPGTSESATPESGPGSEPATSGSETPGSEPATSGSETPGSPAGSPTSTEEGTSTEPSEGSAPGTSTEPSEGSAPGGSAPEAGRSANHTPAGLTGPATSGSETPGTDIQMTQSPSSLSASVGDRVTITCRSTKSLLHSNGITYLYWYQQKPGKAPKLLIYQMSNLASGVPSRFSSSGSGTDFTLTISSLQPEDFATYYCAQNLEIPRTFGQGTKVEIKGATPPETGAETESPGETTGGSAESEPPGEGQVQLVQSGPGLVQPGGSVRISCAASGYTFTNYGMNWVKQAPGKGLEWMGWINTYTGESTYADSFKGRFTFSLDTSASAAYLQINSLRAEDTAVYYCARFAIKGDYWGQGTLLTVSSGGGGSELVVTQEPSHTVSPGGTVTLTCRSSTGAVTSSNYANWVQQKPGQAPRGLIGGTIKRAPGTPARFSGSLLGGKAALTLSGVQPEDEAEYYCALWYPNLWVFGGGTKLTVLGATPPETGAETESPGETTGGSAESEPPGEGEVQLLESGGGIVQPGGSLKLSCAASGFTFNTYAMNWVRQAPGKGLEWVARIRSKYNNYATYYADSVKDRFTISRDDSKNTVYLQMNNLKTEDTAVYYCVRHENFGNSYVSWFAHWGQGTLVTVSSGTAEAASASGEAGRSANHTPAGLTGPPGSPAGSPTSTEEGTSESATPESGPGTSTEPSEGSAPGSPAGSPTSTEEGTSTEPSEGSAPGTSTEPSEGSAPGTSESATPESGPGSEPATSGSETPGSEPATSGSETPGSPAGSPTSTEEGTSESATPESGPGTSTEPSEGSAPGTSTEPSEGSAPGSPAGSPTSTEEGTSTEPSEGSAPGTSTEPSEGSAPGTSESATPESGPGTSTEPSEGSAPGTSESATPESGPGSEPATSGSETPGTSTEPSEGSAPGTSTEPSEGSAPGTSESATPESGPGTSESATPESGPGSPAGSPTSTEEGTSESATPESGPGSEPATSGSETPGTSESATPESGPGTSTEPSEGSAPGTSTEPSEGSAPGTSTEPSEGSAPGTSTEPSEGSAPGTSTEPSEGSAPGTSTEPSEGSAPGSPAGSPTSTEEGTSTEPSEGSAPGTSESATPESGPGSEPATSGSETPGTSESATPESGPGSEPATSGSETPGTSESATPESGPGTSTEPSEGSAPGTSESATPESGPGSPAGSPTSTEEGSPAGSPTSTEEGSPAGSPTSTEEGTSESATPESGPGTSTEPSEGSAPGTSESATPESGPGSEPATSGSETPGTSESATPESGPGSEPATSGSETPGTSESATPESGPGTSTEPSEGSAPGSPAGSPTSTEEGTSESATPESGPGSEPATSGSETPGTSESATPESGPGSPAGSPTSTEEGSPAGSPTSTEEGTSTEPSEGSAPGTSESATPESGPGTSESATPESGPGTSESATPESGPGSEPATSGSETPGSEPATSGSETPGSPAGSPTSTEEGTSTEPSEGSAPGTSTEPSEGSAPGSEPATSGSETPGTSESATPESGPGTSTEPSEGAAEPEA

SEQ ID NO: 1107 - protein, 1745 aa, Artificial Sequence
  Description of Artificial Sequence: Synthetic polypeptide
HHHHHHSPAGSPTSTEEGTSESATPESGPGTSTEPSEGSAPGTSESATPESGPGSEPATSGSETPGTSESATPESGPGSEPATSGSETPGTSESATPESGPGTSTEPSEGSAPGSPAGSPTSTEEGTSESATPESGPGSEPATSGSETPGTSESATPESGPGSPAGSPTSTEEGSPAGSPTSTEEGTSTEPSEGSAPGTSESATPESGPGTSESATPESGPGTSESATPESGPGSEPATSGSETPGSEPATSGSETPGSPAGSPTSTEEGTSTEPSEGSAPGTSTEPSEGSAPGGSAPEAGRSANHTPAGLTGPATSGSETPGTDIQMTQSPSSLSASVGDRVTITCRSTKSLLHSNGITYLYWYQQKPGKAPKLLIYQMSNLASGVPSRFSSSGSGTDFTLTISSLQPEDFATYYCAQNLEIPRTFGQGTKVEIKGATPPETGAETESPGETTGGSAESEPPGEGQVQLVQSGPGLVQPGGSVRISCAASGYTFTNYGMNWVKQAPGKGLEWMGWINTYTGESTYADSFKGRFTFSLDTSASAAYLQINSLRAEDTAVYYCARFAIKGDYWGQGTLLTVSSGGGGSELVVTQEPSHTVSPGGTVTLTCRSSTGEVTTSNYANWVQQKPGQAPRGLIGGTIKRAPGTPARFSGSLLGGKAALTLSGVQPEDEAEYYCALWYPNLWVFGGGTKLTVLGATPPETGAETESPGETTGGSAESEPPGEGEVQLLESGGGIVQPGGSLKLSCAASGFTFNTYAMNWVRQAPGKGLEWVARIRSKYNNYATYYADSVKDRFTISRDDSKNTVYLQMNNLKTEDTAVYYCVRHENFGNSYVSWFAHWGQGTLVTVSSGTAEAASASGEAGRSANHTPAGLTGPPGSPAGSPTSTEEGTSESATPESGPGTSTEPSEGSAPGSPAGSPTSTEEGTSTEPSEGSAPGTSTEPSEGSAPGTSESATPESGPGSEPATSGSETPGSEPATSGSETPGSPAGSPTSTEEGTSESATPESGPGTSTEPSEGSAPGTSTEPSEGSAPGSPAGSPTSTEEGTSTEPSEGSAPGTSTEPSEGSAPGTSESATPESGPGTSTEPSEGSAPGTSESATPESGPGSEPATSGSETPGTSTEPSEGSAPGTSTEPSEGSAPGTSESATPESGPGTSESATPESGPGSPAGSPTSTEEGTSESATPESGPGSEPATSGSETPGTSESATPESGPGTSTEPSEGSAPGTSTEPSEGSAPGTSTEPSEGSAPGTSTEPSEGSAPGTSTEPSEGSAPGTSTEPSEGSAPGSPAGSPTSTEEGTSTEPSEGSAPGTSESATPESGPGSEPATSGSETPGTSESATPESGPGSEPATSGSETPGTSESATPESGPGTSTEPSEGSAPGTSESATPESGPGSPAGSPTSTEEGSPAGSPTSTEEGSPAGSPTSTEEGTSESATPESGPGTSTEPSEGSAPGTSESATPESGPGSEPATSGSETPGTSESATPESGPGSEPATSGSETPGTSESATPESGPGTSTEPSEGSAPGSPAGSPTSTEEGTSESATPESGPGSEPATSGSETPGTSESATPESGPGSPAGSPTSTEEGSPAGSPTSTEEGTSTEPSEGSAPGTSESATPESGPGTSESATPESGPGTSESATPESGPGSEPATSGSETPGSEPATSGSETPGSPAGSPTSTEEGTSTEPSEGSAPGTSTEPSEGSAPGSEPATSGSETPGTSESATPESGPGTSTEPSEGAAEPEA

SEQ ID NO: 1108 - protein, 1745 aa, Artificial Sequence
  Description of Artificial Sequence: Synthetic polypeptide
HHHHHHSPAGSPTSTEEGTSESATPESGPGTSTEPSEGSAPGTSESATPESGPGSEPATSGSETPGTSESATPESGPGSEPATSGSETPGTSESATPESGPGTSTEPSEGSAPGSPAGSPTSTEEGTSESATPESGPGSEPATSGSETPGTSESATPESGPGSPAGSPTSTEEGSPAGSPTSTEEGTSTEPSEGSAPGTSESATPESGPGTSESATPESGPGTSESATPESGPGSEPATSGSETPGSEPATSGSETPGSPAGSPTSTEEGTSTEPSEGSAPGTSTEPSEGSAPGGSAPEAGRSANHTPAGLTGPATSGSETPGTDIQMTQSPSSLSASVGDRVTITCRSTKSLLHSNGITYLYWYQQKPGKAPKLLIYQMSNLASGVPSRFSSSGSGTDFTLTISSLQPEDFATYYCAQNLEIPRTFGQGTKVEIKGATPPETGAETESPGETTGGSAESEPPGEGQVQLVQSGPGLVQPGGSVRISCAASGYTFTNYGMNWVKQAPGKGLEWMGWINTYTGESTYADSFKGRFTFSLDTSASAAYLQINSLRAEDTAVYYCARFAIKGDYWGQGTLLTVSSGGGGSELVVTQEPSLTVSPGGTVTLTCRSSNGAVTSSNYANWVQQKPGQAPRGLIGGTNKRAPGTPARFSGSSLGGKAALTLSGVQPEDEAVYYCALWYPNLWVFGGGTKLTVLGATPPETGAETESPGETTGGSAESEPPGEGEVQLQESGGGIVQPGGSLKLSCAASGFTFNTYAMNWVRQAPGKGLEWVARIRSKYNNYATYYADSVKDRFTISRDDSKNTVYLQMNNLKTEDTAVYYCVRHENFGNSYVSWFAHWGQGTLVTVSSGTAEAASASGEAGRSANHTPAGLTGPPGSPAGSPTSTEEGTSESATPESGPGTSTEPSEGSAPGSPAGSPTSTEEGTSTEPSEGSAPGTSTEPSEGSAPGTSESATPESGPGSEPATSGSETPGSEPATSGSETPGSPAGSPTSTEEGTSESATPESGPGTSTEPSEGSAPGTSTEPSEGSAPGSPAGSPTSTEEGTSTEPSEGSAPGTSTEPSEGSAPGTSESATPESGPGTSTEPSEGSAPGTSESATPESGPGSEPATSGSETPGTSTEPSEGSAPGTSTEPSEGSAPGTSESATPESGPGTSESATPESGPGSPAGSPTSTEEGTSESATPESGPGSEPATSGSETPGTSESATPESGPGTSTEPSEGSAPGTSTEPSEGSAPGTSTEPSEGSAPGTSTEPSEGSAPGTSTEPSEGSAPGTSTEPSEGSAPGSPAGSPTSTEEGTSTEPSEGSAPGTSESATPESGPGSEPATSGSETPGTSESATPESGPGSEPATSGSETPGTSESATPESGPGTSTEPSEGSAPGTSESATPESGPGSPAGSPTSTEEGSPAGSPTSTEEGSPAGSPTSTEEGTSESATPESGPGTSTEPSEGSAPGTSESATPESGPGSEPATSGSETPGTSESATPESGPGSEPATSGSETPGTSESATPESGPGTSTEPSEGSAPGSPAGSPTSTEEGTSESATPESGPGSEPATSGSETPGTSESATPESGPGSPAGSPTSTEEGSPAGSPTSTEEGTSTEPSEGSAPGTSESATPESGPGTSESATPESGPGTSESATPESGPGSEPATSGSETPGSEPATSGSETPGSPAGSPTSTEEGTSTEPSEGSAPGTSTEPSEGSAPGSEPATSGSETPGTSESATPESGPGTSTEPSEGAAEPEA

SEQ ID NO: 1109 - protein, 1745 aa, Artificial Sequence
  Description of Artificial Sequence: Synthetic polypeptide
HHHHHHSPAGSPTSTEEGTSESATPESGPGTSTEPSEGSAPGTSESATPESGPGSEPATSGSETPGTSESATPESGPGSEPATSGSETPGTSESATPESGPGTSTEPSEGSAPGSPAGSPTSTEEGTSESATPESGPGSEPATSGSETPGTSESATPESGPGSPAGSPTSTEEGSPAGSPTSTEEGTSTEPSEGSAPGTSESATPESGPGTSESATPESGPGTSESATPESGPGSEPATSGSETPGSEPATSGSETPGSPAGSPTSTEEGTSTEPSEGSAPGTSTEPSEGSAPGGSAPEAGRSANHTPAGLTGPATSGSETPGTDIQMTQSPSSLSASVGDRVTITCRSTKSLLHSNGITYLYWYQQKPGKAPKLLIYQMSNLASGVPSRFSSSGSGTDFTLTISSLQPEDFATYYCAQNLEIPRTFGQGTKVEIKGATPPETGAETESPGETTGGSAESEPPGEGQVQLVQSGPGLVQPGGSVRISCAASGYTFTNYGMNWVKQAPGKGLEWMGWINTYTGESTYADSFKGRFTFSLDTSASAAYLQINSLRAEDTAVYYCARFAIKGDYWGQGTLLTVSSGGGGSELVVTQEPSLTVSPGGTVTLTCRSSNGAVTSSNYANWVQQKPGQAPRGLIGGTNKRAPGTPARFSGSLLGGSAALTLSGVQPEDEAVYYCALWYPNLWVFGGGTKLTVLGATPPETGAETESPGETTGGSAESEPPGEGEVQLQESGGGIVQPGGSLKLSCAASGFTFNTYAMNWVRQAPGKGLEWVARIRSKYNNYATYYADSVKDRFTISRDDSKNTVYLQMNNLKTEDTAVYYCVRHENFGNSYVSWFAHWGQGTLVTVSSGTAEAASASGEAGRSANHTPAGLTGPPGSPAGSPTSTEEGTSESATPESGPGTSTEPSEGSAPGSPAGSPTSTEEGTSTEPSEGSAPGTSTEPSEGSAPGTSESATPESGPGSEPATSGSETPGSEPATSGSETPGSPAGSPTSTEEGTSESATPESGPGTSTEPSEGSAPGTSTEPSEGSAPGSPAGSPTSTEEGTSTEPSEGSAPGTSTEPSEGSAPGTSESATPESGPGTSTEPSEGSAPGTSESATPESGPGSEPATSGSETPGTSTEPSEGSAPGTSTEPSEGSAPGTSESATPESGPGTSESATPESGPGSPAGSPTSTEEGTSESATPESGPGSEPATSGSETPGTSESATPESGPGTSTEPSEGSAPGTSTEPSEGSAPGTSTEPSEGSAPGTSTEPSEGSAPGTSTEPSEGSAPGTSTEPSEGSAPGSPAGSPTSTEEGTSTEPSEGSAPGTSESATPESGPGSEPATSGSETPGTSESATPESGPGSEPATSGSETPGTSESATPESGPGTSTEPSEGSAPGTSESATPESGPGSPAGSPTSTEEGSPAGSPTSTEEGSPAGSPTSTEEGTSESATPESGPGTSTEPSEGSAPGTSESATPESGPGSEPATSGSETPGTSESATPESGPGSEPATSGSETPGTSESATPESGPGTSTEPSEGSAPGSPAGSPTSTEEGTSESATPESGPGSEPATSGSETPGTSESATPESGPGSPAGSPTSTEEGSPAGSPTSTEEGTSTEPSEGSAPGTSESATPESGPGTSESATPESGPGTSESATPESGPGSEPATSGSETPGSEPATSGSETPGSPAGSPTSTEEGTSTEPSEGSAPGTSTEPSEGSAPGSEPATSGSETPGTSESATPESGPGTSTEPSEGAAEPEA

SEQ ID NO: 1110 - protein, 1745 aa, Artificial Sequence
  Description of Artificial Sequence: Synthetic polypeptide
HHHHHHSPAGSPTSTEEGTSESATPESGPGTSTEPSEGSAPGTSESATPESGPGSEPATSGSETPGTSESATPESGPGSEPATSGSETPGTSESATPESGPGTSTEPSEGSAPGSPAGSPTSTEEGTSESATPESGPGSEPATSGSETPGTSESATPESGPGSPAGSPTSTEEGSPAGSPTSTEEGTSTEPSEGSAPGTSESATPESGPGTSESATPESGPGTSESATPESGPGSEPATSGSETPGSEPATSGSETPGSPAGSPTSTEEGTSTEPSEGSAPGTSTEPSEGSAPGGSAPEAGRSANHTPAGLTGPATSGSETPGTDIQMTQSPSSLSASVGDRVTITCRSTKSLLHSNGITYLYWYQQKPGKAPKLLIYQMSNLASGVPSRFSSSGSGTDFTLTISSLQPEDFATYYCAQNLEIPRTFGQGTKVEIKGATPPETGAETESPGETTGGSAESEPPGEGQVQLVQSGPGLVQPGGSVRISCAASGYTFTNYGMNWVKQAPGKGLEWMGWINTYTGESTYADSFKGRFTFSLDTSASAAYLQINSLRAEDTAVYYCARFAIKGDYWGQGTLLTVSSGGGGSELVVTQEPSLTVSPGGTVTLTCRSSNGAVTSSNYANWVQQKPGQAPRGLIGGTNKRAPGTPARFSGSSLGGSAALTLSGVQPEDEAVYYCALWYPNLWVFGGGTKLTVLGATPPETGAETESPGETTGGSAESEPPGEGEVQLQESGGGIVQPGGSLKLSCAASGFTFNTYAMNWVRQAPGKGLEWVARIRSKYNNYATYYADSVKDRFTISRDDSKNTVYLQMNNLKTEDTAVYYCVRHENFGNSYVSWFAHWGQGTLVTVSSGTAEAASASGEAGRSANHTPAGLTGPPGSPAGSPTSTEEGTSESATPESGPGTSTEPSEGSAPGSPAGSPTSTEEGTSTEPSEGSAPGTSTEPSEGSAPGTSESATPESGPGSEPATSGSETPGSEPATSGSETPGSPAGSPTSTEEGTSESATPESGPGTSTEPSEGSAPGTSTEPSEGSAPGSPAGSPTSTEEGTSTEPSEGSAPGTSTEPSEGSAPGTSESATPESGPGTSTEPSEGSAPGTSESATPESGPGSEPATSGSETPGTSTEPSEGSAPGTSTEPSEGSAPGTSESATPESGPGTSESATPESGPGSPAGSPTSTEEGTSESATPESGPGSEPATSGSETPGTSESATPESGPGTSTEPSEGSAPGTSTEPSEGSAPGTSTEPSEGSAPGTSTEPSEGSAPGTSTEPSEGSAPGTSTEPSEGSAPGSPAGSPTSTEEGTSTEPSEGSAPGTSESATPESGPGSEPATSGSETPGTSESATPESGPGSEPATSGSETPGTSESATPESGPGTSTEPSEGSAPGTSESATPESGPGSPAGSPTSTEEGSPAGSPTSTEEGSPAGSPTSTEEGTSESATPESGPGTSTEPSEGSAPGTSESATPESGPGSEPATSGSETPGTSESATPESGPGSEPATSGSETPGTSESATPESGPGTSTEPSEGSAPGSPAGSPTSTEEGTSESATPESGPGSEPATSGSETPGTSESATPESGPGSPAGSPTSTEEGSPAGSPTSTEEGTSTEPSEGSAPGTSESATPESGPGTSESATPESGPGTSESATPESGPGSEPATSGSETPGSEPATSGSETPGSPAGSPTSTEEGTSTEPSEGSAPGTSTEPSEGSAPGSEPATSGSETPGTSESATPESGPGTSTEPSEGAAEPEA

SEQ ID NO: 1111 - protein, 1745 aa, Artificial Sequence
  Description of Artificial Sequence: Synthetic polypeptide
HHHHHHSPAGSPTSTEEGTSESATPESGPGTSTEPSEGSAPGTSESATPESGPGSEPATSGSETPGTSESATPESGPGSEPATSGSETPGTSESATPESGPGTSTEPSEGSAPGSPAGSPTSTEEGTSESATPESGPGSEPATSGSETPGTSESATPESGPGSPAGSPTSTEEGSPAGSPTSTEEGTSTEPSEGSAPGTSESATPESGPGTSESATPESGPGTSESATPESGPGSEPATSGSETPGSEPATSGSETPGSPAGSPTSTEEGTSTEPSEGSAPGTSTEPSEGSAPGGSAPEAGRSANHTPAGLTGPATSGSETPGTDIQMTQSPSSLSASVGDRVTITCRSTKSLLHSNGITYLYWYQQKPGKAPKLLIYQMSNLASGVPSRFSSSGSGTDFTLTISSLQPEDFATYYCAQNLEIPRTFGQGTKVEIKGATPPETGAETESPGETTGGSAESEPPGEGQVQLVQSGPGLVQPGGSVRISCAASGYTFTNYGMNWVKQAPGKGLEWMGWINTYTGESTYADSFKGRFTFSLDTSASAAYLQINSLRAEDTAVYYCARFAIKGDYWGQGTLLTVSSGGGGSELVVTQEPSLTVSPGGTVTLTCRSSTGAVTTSNYANWVQQKPGQAPRGLIGGTNKRAPGTPARFSGSSLGGSAALTLSGVQPEDEAEYYCALWYSNLWVFGGGTKLTVLGATPPETGAETESPGETTGGSAESEPPGEGEVQLQESGGGLVQPGGSLKLSCAASGFTFNTYAMNWVRQAPGKGLEWVARIRSKYNNYATYYADSVKDRFTISRDDSKNTAYLQMNNLKTEDTAVYYCVRHGNFGNSYVSWFAYWGQGTLVTVSSGTAEAASASGEAGRSANHTPAGLTGPPGSPAGSPTSTEEGTSESATPESGPGTSTEPSEGSAPGSPAGSPTSTEEGTSTEPSEGSAPGTSTEPSEGSAPGTSESATPESGPGSEPATSGSETPGSEPATSGSETPGSPAGSPTSTEEGTSESATPESGPGTSTEPSEGSAPGTSTEPSEGSAPGSPAGSPTSTEEGTSTEPSEGSAPGTSTEPSEGSAPGTSESATPESGPGTSTEPSEGSAPGTSESATPESGPGSEPATSGSETPGTSTEPSEGSAPGTSTEPSEGSAPGTSESATPESGPGTSESATPESGPGSPAGSPTSTEEGTSESATPESGPGSEPATSGSETPGTSESATPESGPGTSTEPSEGSAPGTSTEPSEGSAPGTSTEPSEGSAPGTSTEPSEGSAPGTSTEPSEGSAPGTSTEPSEGSAPGSPAGSPTSTEEGTSTEPSEGSAPGTSESATPESGPGSEPATSGSETPGTSESATPESGPGSEPATSGSETPGTSESATPESGPGTSTEPSEGSAPGTSESATPESGPGSPAGSPTSTEEGSPAGSPTSTEEGSPAGSPTSTEEGTSESATPESGPGTSTEPSEGSAPGTSESATPESGPGSEPATSGSETPGTSESATPESGPGSEPATSGSETPGTSESATPESGPGTSTEPSEGSAPGSPAGSPTSTEEGTSESATPESGPGSEPATSGSETPGTSESATPESGPGSPAGSPTSTEEGSPAGSPTSTEEGTSTEPSEGSAPGTSESATPESGPGTSESATPESGPGTSESATPESGPGSEPATSGSETPGSEPATSGSETPGSPAGSPTSTEEGTSTEPSEGSAPGTSTEPSEGSAPGSEPATSGSETPGTSESATPESGPGTSTEPSEGAAEPEA

SEQ ID NO: 1112 - protein, 1022 aa, Artificial Sequence
  Description of Artificial Sequence: Synthetic polypeptide
HHHHHHGSPAGSPTSTEEGTSESATPESGPGTSTEPSEGSAPGSPAGSPTSTEEGTSTEPSEGSAPGTSTEPSEGSAPGTSESATPESGPGSEPATSGSETPGSEPATSGSETPGSPAGSPTSTEEGTSESATPESGPGTSTEPSEGSAPEAGRSANHTPAGLTGPATSGSETPGTDIQMTQSPSSLSASVGDRVTITCRSTKSLLHSNGITYLYWYQQKPGKAPKLLIYQMSNLASGVPSRFSSSGSGTDFTLTISSLQPEDFATYYCAQNLEIPRTFGQGTKVEIKGATPPETGAETESPGETTGGSAESEPPGEGQVQLVQSGPGLVQPGGSVRISCAASGYTFTNYGMNWVKQAPGKGLEWMGWINTYTGESTYADSFKGRFTFSLDTSASAAYLQINSLRAEDTAVYYCARFAIKGDYWGQGTLLTVSSGGGGSELVVTQEPSLTVSPGGTVTLTCRSSNGAVTSSNYANWVQQKPGQAPRGLIGGTNKRAPGTPARFSGSLLGGKAALTLSGVQPEDEAVYYCALWYPNLWVFGGGTKLTVLGATPPETGAETESPGETTGGSAESEPPGEGEVQLLESGGGIVQPGGSLKLSCAASGFTFNTYAMNWVRQAPGKGLEWVARIRSKYNNYATYYADSVKDRFTISRDDSKNTVYLQMNNLKTEDTAVYYCVRHENFGNSYVSWFAHWGQGTLVTVSSGTAEAASASGEAGRSANHTPAGLTGPPGSPAGSPTSTEEGTSESATPESGPGTSTEPSEGSAPGSPAGSPTSTEEGTSTEPSEGSAPGTSTEPSEGSAPGTSESATPESGPGSEPATSGSETPGSEPATSGSETPGSPAGSPTSTEEGTSESATPESGPGTSTEPSEGSAPGTSTEPSEGSAPGSPAGSPTSTEEGTSTEPSEGSAPGTSTEPSEGSAPGTSESATPESGPGTSTEPSEGSAPGTSESATPESGPGSEPATSGSETPGTSTEPSEGSAPGTSTEPSEGSAPGTSESATPESGPGTSESATPEGAAEPEA

SEQ ID NO: 1113 - protein, 1022 aa, Artificial Sequence
  Description of Artificial Sequence: Synthetic polypeptide
HHHHHHGSPAGSPTSTEEGTSESATPESGPGTSTEPSEGSAPGSPAGSPTSTEEGTSTEPSEGSAPGTSTEPSEGSAPGTSESATPESGPGSEPATSGSETPGSEPATSGSETPGSPAGSPTSTEEGTSESATPESGPGTSTEPSEGSAPEAGRSANHTPAGLTGPATSGSETPGTDIQMTQSPSSLSASVGDRVTITCRSTKSLLHSNGITYLYWYQQKPGKAPKLLIYQMSNLASGVPSRFSSSGSGTDFTLTISSLQPEDFATYYCAQNLEIPRTFGQGTKVEIKGATPPETGAETESPGETTGGSAESEPPGEGQVQLVQSGPGLVQPGGSVRISCAASGYTFTNYGMNWVKQAPGKGLEWMGWINTYTGESTYADSFKGRFTFSLDTSASAAYLQINSLRAEDTAVYYCARFAIKGDYWGQGTLLTVSSGGGGSELVVTQEPSLTVSPGGTVTLTCRSSNGEVTTSNYANWVQQKPGQAPRGLIGGTIKRAPGTPARFSGSLLGGKAALTLSGVQPEDEAVYYCALWYPNLWVFGGGTKLTVLGATPPETGAETESPGETTGGSAESEPPGEGEVQLLESGGGIVQPGGSLKLSCAASGFTFNTYAMNWVRQAPGKGLEWVARIRSKYNNYATYYADSVKDRFTISRDDSKNTVYLQMNNLKTEDTAVYYCVRHENFGNSYVSWFAHWGQGTLVTVSSGTAEAASASGEAGRSANHTPAGLTGPPGSPAGSPTSTEEGTSESATPESGPGTSTEPSEGSAPGSPAGSPTSTEEGTSTEPSEGSAPGTSTEPSEGSAPGTSESATPESGPGSEPATSGSETPGSEPATSGSETPGSPAGSPTSTEEGTSESATPESGPGTSTEPSEGSAPGTSTEPSEGSAPGSPAGSPTSTEEGTSTEPSEGSAPGTSTEPSEGSAPGTSESATPESGPGTSTEPSEGSAPGTSESATPESGPGSEPATSGSETPGTSTEPSEGSAPGTSTEPSEGSAPGTSESATPESGPGTSESATPEGAAEPEA

SEQ ID NO: 1114 - protein, 1022 aa, Artificial Sequence
  Description of Artificial Sequence: Synthetic polypeptide
HHHHHHGSPAGSPTSTEEGTSESATPESGPGTSTEPSEGSAPGSPAGSPTSTEEGTSTEPSEGSAPGTSTEPSEGSAPGTSESATPESGPGSEPATSGSETPGSEPATSGSETPGSPAGSPTSTEEGTSESATPESGPGTSTEPSEGSAPEAGRSANHTPAGLTGPATSGSETPGTDIQMTQSPSSLSASVGDRVTITCRSTKSLLHSNGITYLYWYQQKPGKAPKLLIYQMSNLASGVPSRFSSSGSGTDFTLTISSLQPEDFATYYCAQNLEIPRTFGQGTKVEIKGATPPETGAETESPGETTGGSAESEPPGEGQVQLVQSGPGLVQPGGSVRISCAASGYTFTNYGMNWVKQAPGKGLEWMGWINTYTGESTYADSFKGRFTFSLDTSASAAYLQINSLRAEDTAVYYCARFAIKGDYWGQGTLLTVSSGGGGSELVVTQEPSHTVSPGGTVTLTCRSSTGAVTSSNYANWVQQKPGQAPRGLIGGTIKRAPGTPARFSGSLLGGKAALTLSGVQPEDEAEYYCALWYPNLWVFGGGTKLTVLGATPPETGAETESPGETTGGSAESEPPGEGEVQLLESGGGIVQPGGSLKLSCAASGFTFNTYAMNWVRQAPGKGLEWVARIRSKYNNYATYYADSVKDRFTISRDDSKNTVYLQMNNLKTEDTAVYYCVRHENFGNSYVSWFAHWGQGTLVTVSSGTAEAASASGEAGRSANHTPAGLTGPPGSPAGSPTSTEEGTSESATPESGPGTSTEPSEGSAPGSPAGSPTSTEEGTSTEPSEGSAPGTSTEPSEGSAPGTSESATPESGPGSEPATSGSETPGSEPATSGSETPGSPAGSPTSTEEGTSESATPESGPGTSTEPSEGSAPGTSTEPSEGSAPGSPAGSPTSTEEGTSTEPSEGSAPGTSTEPSEGSAPGTSESATPESGPGTSTEPSEGSAPGTSESATPESGPGSEPATSGSETPGTSTEPSEGSAPGTSTEPSEGSAPGTSESATPESGPGTSESATPEGAAEPEA

SEQ ID NO: 1115 - protein, 1022 aa, Artificial Sequence
  Description of Artificial Sequence: Synthetic polypeptide
HHHHHHGSPAGSPTSTEEGTSESATPESGPGTSTEPSEGSAPGSPAGSPTSTEEGTSTEPSEGSAPGTSTEPSEGSAPGTSESATPESGPGSEPATSGSETPGSEPATSGSETPGSPAGSPTSTEEGTSESATPESGPGTSTEPSEGSAPEAGRSANHTPAGLTGPATSGSETPGTDIQMTQSPSSLSASVGDRVTITCRSTKSLLHSNGITYLYWYQQKPGKAPKLLIYQMSNLASGVPSRFSSSGSGTDFTLTISSLQPEDFATYYCAQNLEIPRTFGQGTKVEIKGATPPETGAETESPGETTGGSAESEPPGEGQVQLVQSGPGLVQPGGSVRISCAASGYTFTNYGMNWVKQAPGKGLEWMGWINTYTGESTYADSFKGRFTFSLDTSASAAYLQINSLRAEDTAVYYCARFAIKGDYWGQGTLLTVSSGGGGSELVVTQEPSHTVSPGGTVTLTCRSSTGEVTTSNYANWVQQKPGQAPRGLIGGTIKRAPGTPARFSGSLLGGKAALTLSGVQPEDEAEYYCALWYPNLWVFGGGTKLTVLGATPPETGAETESPGETTGGSAESEPPGEGEVQLLESGGGIVQPGGSLKLSCAASGFTFNTYAMNWVRQAPGKGLEWVARIRSKYNNYATYYADSVKDRFTISRDDSKNTVYLQMNNLKTEDTAVYYCVRHENFGNSYVSWFAHWGQGTLVTVSSGTAEAASASGEAGRSANHTPAGLTGPPGSPAGSPTSTEEGTSESATPESGPGTSTEPSEGSAPGSPAGSPTSTEEGTSTEPSEGSAPGTSTEPSEGSAPGTSESATPESGPGSEPATSGSETPGSEPATSGSETPGSPAGSPTSTEEGTSESATPESGPGTSTEPSEGSAPGTSTEPSEGSAPGSPAGSPTSTEEGTSTEPSEGSAPGTSTEPSEGSAPGTSESATPESGPGTSTEPSEGSAPGTSESATPESGPGSEPATSGSETPGTSTEPSEGSAPGTSTEPSEGSAPGTSESATPESGPGTSESATPEGAAEPEA

SEQ ID NO: 1116 - protein, 1022 aa, Artificial Sequence
  Description of Artificial Sequence: Synthetic polypeptide
HHHHHHGSPAGSPTSTEEGTSESATPESGPGTSTEPSEGSAPGSPAGSPTSTEEGTSTEPSEGSAPGTSTEPSEGSAPGTSESATPESGPGSEPATSGSETPGSEPATSGSETPGSPAGSPTSTEEGTSESATPESGPGTSTEPSEGSAPEAGRSANHTPAGLTGPATSGSETPGTDIQMTQSPSSLSASVGDRVTITCRSTKSLLHSNGITYLYWYQQKPGKAPKLLIYQMSNLASGVPSRFSSSGSGTDFTLTISSLQPEDFATYYCAQNLEIPRTFGQGTKVEIKGATPPETGAETESPGETTGGSAESEPPGEGQVQLVQSGPGLVQPGGSVRISCAASGYTFTNYGMNWVKQAPGKGLEWMGWINTYTGESTYADSFKGRFTFSLDTSASAAYLQINSLRAEDTAVYYCARFAIKGDYWGQGTLLTVSSGGGGSELVVTQEPSLTVSPGGTVTLTCRSSNGAVTSSNYANWVQQKPGQAPRGLIGGTNKRAPGTPARFSGSSLGGKAALTLSGVQPEDEAVYYCALWYPNLWVFGGGTKLTVLGATPPETGAETESPGETTGGSAESEPPGEGEVQLQESGGGIVQPGGSLKLSCAASGFTFNTYAMNWVRQAPGKGLEWVARIRSKYNNYATYYADSVKDRFTISRDDSKNTVYLQMNNLKTEDTAVYYCVRHENFGNSYVSWFAHWGQGTLVTVSSGTAEAASASGEAGRSANHTPAGLTGPPGSPAGSPTSTEEGTSESATPESGPGTSTEPSEGSAPGSPAGSPTSTEEGTSTEPSEGSAPGTSTEPSEGSAPGTSESATPESGPGSEPATSGSETPGSEPATSGSETPGSPAGSPTSTEEGTSESATPESGPGTSTEPSEGSAPGTSTEPSEGSAPGSPAGSPTSTEEGTSTEPSEGSAPGTSTEPSEGSAPGTSESATPESGPGTSTEPSEGSAPGTSESATPESGPGSEPATSGSETPGTSTEPSEGSAPGTSTEPSEGSAPGTSESATPESGPGTSESATPEGAAEPEA

SEQ ID NO: 1117 - protein, 1022 aa, Artificial Sequence
  Description of Artificial Sequence: Synthetic polypeptide
HHHHHHGSPAGSPTSTEEGTSESATPESGPGTSTEPSEGSAPGSPAGSPTSTEEGTSTEPSEGSAPGTSTEPSEGSAPGTSESATPESGPGSEPATSGSETPGSEPATSGSETPGSPAGSPTSTEEGTSESATPESGPGTSTEPSEGSAPEAGRSANHTPAGLTGPATSGSETPGTDIQMTQSPSSLSASVGDRVTITCRSTKSLLHSNGITYLYWYQQKPGKAPKLLIYQMSNLASGVPSRFSSSGSGTDFTLTISSLQPEDFATYYCAQNLEIPRTFGQGTKVEIKGATPPETGAETESPGETTGGSAESEPPGEGQVQLVQSGPGLVQPGGSVRISCAASGYTFTNYGMNWVKQAPGKGLEWMGWINTYTGESTYADSFKGRFTFSLDTSASAAYLQINSLRAEDTAVYYCARFAIKGDYWGQGTLLTVSSGGGGSELVVTQEPSLTVSPGGTVTLTCRSSNGAVTSSNYANWVQQKPGQAPRGLIGGTNKRAPGTPARFSGSLLGGSAALTLSGVQPEDEAVYYCALWYPNLWVFGGGTKLTVLGATPPETGAETESPGETTGGSAESEPPGEGEVQLQESGGGIVQPGGSLKLSCAASGFTFNTYAMNWVRQAPGKGLEWVARIRSKYNNYATYYADSVKDRFTISRDDSKNTVYLQMNNLKTEDTAVYYCVRHENFGNSYVSWFAHWGQGTLVTVSSGTAEAASASGEAGRSANHTPAGLTGPPGSPAGSPTSTEEGTSESATPESGPGTSTEPSEGSAPGSPAGSPTSTEEGTSTEPSEGSAPGTSTEPSEGSAPGTSESATPESGPGSEPATSGSETPGSEPATSGSETPGSPAGSPTSTEEGTSESATPESGPGTSTEPSEGSAPGTSTEPSEGSAPGSPAGSPTSTEEGTSTEPSEGSAPGTSTEPSEGSAPGTSESATPESGPGTSTEPSEGSAPGTSESATPESGPGSEPATSGSETPGTSTEPSEGSAPGTSTEPSEGSAPGTSESATPESGPGTSESATPEGAAEPEA

SEQ ID NO: 1118 - protein, 1022 aa, Artificial Sequence
  Description of Artificial Sequence: Synthetic polypeptide
HHHHHHGSPAGSPTSTEEGTSESATPESGPGTSTEPSEGSAPGSPAGSPTSTEEGTSTEPSEGSAPGTSTEPSEGSAPGTSESATPESGPGSEPATSGSETPGSEPATSGSETPGSPAGSPTSTEEGTSESATPESGPGTSTEPSEGSAPEAGRSANHTPAGLTGPATSGSETPGTDIQMTQSPSSLSASVGDRVTITCRSTKSLLHSNGITYLYWYQQKPGKAPKLLIYQMSNLASGVPSRFSSSGSGTDFTLTISSLQPEDFATYYCAQNLEIPRTFGQGTKVEIKGATPPETGAETESPGETTGGSAESEPPGEGQVQLVQSGPGLVQPGGSVRISCAASGYTFTNYGMNWVKQAPGKGLEWMGWINTYTGESTYADSFKGRFTFSLDTSASAAYLQINSLRAEDTAVYYCARFAIKGDYWGQGTLLTVSSGGGGSELVVTQEPSLTVSPGGTVTLTCRSSNGAVTSSNYANWVQQKPGQAPRGLIGGTNKRAPGTPARFSGSSLGGSAALTLSGVQPEDEAVYYCALWYPNLWVFGGGTKLTVLGATPPETGAETESPGETTGGSAESEPPGEGEVQLQESGGGIVQPGGSLKLSCAASGFTFNTYAMNWVRQAPGKGLEWVARIRSKYNNYATYYADSVKDRFTISRDDSKNTVYLQMNNLKTEDTAVYYCVRHENFGNSYVSWFAHWGQGTLVTVSSGTAEAASASGEAGRSANHTPAGLTGPPGSPAGSPTSTEEGTSESATPESGPGTSTEPSEGSAPGSPAGSPTSTEEGTSTEPSEGSAPGTSTEPSEGSAPGTSESATPESGPGSEPATSGSETPGSEPATSGSETPGSPAGSPTSTEEGTSESATPESGPGTSTEPSEGSAPGTSTEPSEGSAPGSPAGSPTSTEEGTSTEPSEGSAPGTSTEPSEGSAPGTSESATPESGPGTSTEPSEGSAPGTSESATPESGPGSEPATSGSETPGTSTEPSEGSAPGTSTEPSEGSAPGTSESATPESGPGTSESATPEGAAEPEA

SEQ ID NO: 1119 - protein, 1022 aa, Artificial Sequence
  Description of Artificial Sequence: Synthetic polypeptide
HHHHHHGSPAGSPTSTEEGTSESATPESGPGTSTEPSEGSAPGSPAGSPTSTEEGTSTEPSEGSAPGTSTEPSEGSAPGTSESATPESGPGSEPATSGSETPGSEPATSGSETPGSPAGSPTSTEEGTSESATPESGPGTSTEPSEGSAPEAGRSANHTPAGLTGPATSGSETPGTDIQMTQSPSSLSASVGDRVTITCRSTKSLLHSNGITYLYWYQQKPGKAPKLLIYQMSNLASGVPSRFSSSGSGTDFTLTISSLQPEDFATYYCAQNLEIPRTFGQGTKVEIKGATPPETGAETESPGETTGGSAESEPPGEGQVQLVQSGPGLVQPGGSVRISCAASGYTFTNYGMNWVKQAPGKGLEWMGWINTYTGESTYADSFKGRFTFSLDTSASAAYLQINSLRAEDTAVYYCARFAIKGDYWGQGTLLTVSSGGGGSELVVTQEPSLTVSPGGTVTLTCRSSTGAVTTSNYANWVQQKPGQAPRGLIGGTNKRAPGTPARFSGSSLGGSAALTLSGVQPEDEAEYYCALWYSNLWVFGGGTKLTVLGATPPETGAETESPGETTGGSAESEPPGEGEVQLQESGGGLVQPGGSLKLSCAASGFTFNTYAMNWVRQAPGKGLEWVARIRSKYNNYATYYADSVKDRFTISRDDSKNTAYLQMNNLKTEDTAVYYCVRHGNFGNSYVSWFAYWGQGTLVTVSSGTAEAASASGEAGRSANHTPAGLTGPPGSPAGSPTSTEEGTSESATPESGPGTSTEPSEGSAPGSPAGSPTSTEEGTSTEPSEGSAPGTSTEPSEGSAPGTSESATPESGPGSEPATSGSETPGSEPATSGSETPGSPAGSPTSTEEGTSESATPESGPGTSTEPSEGSAPGTSTEPSEGSAPGSPAGSPTSTEEGTSTEPSEGSAPGTSTEPSEGSAPGTSESATPESGPGTSTEPSEGSAPGTSESATPESGPGSEPATSGSETPGTSTEPSEGSAPGTSTEPSEGSAPGTSESATPESGPGTSESATPEGAAEPEA

SEQ ID NO: 1120 - protein, 1177 aa, Artificial Sequence
  Description of Artificial Sequence: Synthetic polypeptide
HHHHHHSPAGSPTSTEEGTSESATPESGPGTSTEPSEGSAPGTSESATPESGPGSEPATSGSETPGTSESATPESGPGSEPATSGSETPGTSESATPESGPGTSTEPSEGSAPGSPAGSPTSTEEGTSESATPESGPGSEPATSGSETPGTSESATPESGPGSPAGSPTSTEEGSPAGSPTSTEEGTSTEPSEGSAPGTSESATPESGPGTSESATPESGPGTSESATPESGPGSEPATSGSETPGSEPATSGSETPGSPAGSPTSTEEGTSTEPSEGSAPGTSTEPSEGSAPGGSAPEAGRSANHTPAGLTGPATSGSETPGTDIQMTQSPSSLSASVGDRVTITCRSTKSLLHSNGITYLYWYQQKPGKAPKLLIYQMSNLASGVPSRFSSSGSGTDFTLTISSLQPEDFATYYCAQNLEIPRTFGQGTKVEIKGATPPETGAETESPGETTGGSAESEPPGEGQVQLVQSGPGLVQPGGSVRISCAASGYTFTNYGMNWVKQAPGKGLEWMGWINTYTGESTYADSFKGRFTFSLDTSASAAYLQINSLRAEDTAVYYCARFAIKGDYWGQGTLLTVSSGGGGSELVVTQEPSLTVSPGGTVTLTCRSSNGAVTSSNYANWVQQKPGQAPRGLIGGTNKRAPGTPARFSGSLLGGKAALTLSGVQPEDEAVYYCALWYPNLWVFGGGTKLTVLGATPPETGAETESPGETTGGSAESEPPGEGEVQLLESGGGIVQPGGSLKLSCAASGFTFNTYAMNWVRQAPGKGLEWVARIRSKYNNYATYYADSVKDRFTISRDDSKNTVYLQMNNLKTEDTAVYYCVRHENFGNSYVSWFAHWGQGTLVTVSSGTAEAASASGEAGRSANHTPAGLTGPPGSPAGSPTSTEEGTSESATPESGPGTSTEPSEGSAPGSPAGSPTSTEEGTSTEPSEGSAPGTSTEPSEGSAPGTSESATPESGPGSEPATSGSETPGSEPATSGSETPGSPAGSPTSTEEGTSESATPESGPGTSTEPSEGSAPGTSTEPSEGSAPGSPAGSPTSTEEGTSTEPSEGSAPGTSTEPSEGSAPGTSESATPESGPGTSTEPSEGSAPGTSESATPESGPGSEPATSGSETPGTSTEPSEGSAPGTSTEPSEGSAPGTSESATPESGPGTSESATPESGPGSPAGAAEPEA

SEQ ID NO: 1121 - protein, 1177 aa, Artificial Sequence
  Description of Artificial Sequence: Synthetic polypeptide
HHHHHHSPAGSPTSTEEGTSESATPESGPGTSTEPSEGSAPGTSESATPESGPGSEPATSGSETPGTSESATPESGPGSEPATSGSETPGTSESATPESGPGTSTEPSEGSAPGSPAGSPTSTEEGTSESATPESGPGSEPATSGSETPGTSESATPESGPGSPAGSPTSTEEGSPAGSPTSTEEGTSTEPSEGSAPGTSESATPESGPGTSESATPESGPGTSESATPESGPGSEPATSGSETPGSEPATSGSETPGSPAGSPTSTEEGTSTEPSEGSAPGTSTEPSEGSAPGGSAPEAGRSANHTPAGLTGPATSGSETPGTDIQMTQSPSSLSASVGDRVTITCRSTKSLLHSNGITYLYWYQQKPGKAPKLLIYQMSNLASGVPSRFSSSGSGTDFTLTISSLQPEDFATYYCAQNLEIPRTFGQGTKVEIKGATPPETGAETESPGETTGGSAESEPPGEGQVQLVQSGPGLVQPGGSVRISCAASGYTFTNYGMNWVKQAPGKGLEWMGWINTYTGESTYADSFKGRFTFSLDTSASAAYLQINSLRAEDTAVYYCARFAIKGDYWGQGTLLTVSSGGGGSELVVTQEPSLTVSPGGTVTLTCRSSNGEVTTSNYANWVQQKPGQAPRGLIGGTIKRAPGTPARFSGSLLGGKAALTLSGVQPEDEAVYYCALWYPNLWVFGGGTKLTVLGATPPETGAETESPGETTGGSAESEPPGEGEVQLLESGGGIVQPGGSLKLSCAASGFTFNTYAMNWVRQAPGKGLEWVARIRSKYNNYATYYADSVKDRFTISRDDSKNTVYLQMNNLKTEDTAVYYCVRHENFGNSYVSWFAHWGQGTLVTVSSGTAEAASASGEAGRSANHTPAGLTGPPGSPAGSPTSTEEGTSESATPESGPGTSTEPSEGSAPGSPAGSPTSTEEGTSTEPSEGSAPGTSTEPSEGSAPGTSESATPESGPGSEPATSGSETPGSEPATSGSETPGSPAGSPTSTEEGTSESATPESGPGTSTEPSEGSAPGTSTEPSEGSAPGSPAGSPTSTEEGTSTEPSEGSAPGTSTEPSEGSAPGTSESATPESGPGTSTEPSEGSAPGTSESATPESGPGSEPATSGSETPGTSTEPSEGSAPGTSTEPSEGSAPGTSESATPESGPGTSESATPESGPGSPAGAAEPEA

SEQ ID NO: 1122 - protein, 1177 aa, Artificial Sequence
  Description of Artificial Sequence: Synthetic polypeptide
HHHHHHSPAGSPTSTEEGTSESATPESGPGTSTEPSEGSAPGTSESATPESGPGSEPATSGSETPGTSESATPESGPGSEPATSGSETPGTSESATPESGPGTSTEPSEGSAPGSPAGSPTSTEEGTSESATPESGPGSEPATSGSETPGTSESATPESGPGSPAGSPTSTEEGSPAGSPTSTEEGTSTEPSEGSAPGTSESATPESGPGTSESATPESGPGTSESATPESGPGSEPATSGSETPGSEPATSGSETPGSPAGSPTSTEEGTSTEPSEGSAPGTSTEPSEGSAPGGSAPEAGRSANHTPAGLTGPATSGSETPGTDIQMTQSPSSLSASVGDRVTITCRSTKSLLHSNGITYLYWYQQKPGKAPKLLIYQMSNLASGVPSRFSSSGSGTDFTLTISSLQPEDFATYYCAQNLEIPRTFGQGTKVEIKGATPPETGAETESPGETTGGSAESEPPGEGQVQLVQSGPGLVQPGGSVRISCAASGYTFTNYGMNWVKQAPGKGLEWMGWINTYTGESTYADSFKGRFTFSLDTSASAAYLQINSLRAEDTAVYYCARFAIKGDYWGQGTLLTVSSGGGGSELVVTQEPSHTVSPGGTVTLTCRSSTGAVTSSNYANWVQQKPGQAPRGLIGGTIKRAPGTPARFSGSLLGGKAALTLSGVQPEDEAEYYCALWYPNLWVFGGGTKLTVLGATPPETGAETESPGETTGGSAESEPPGEGEVQLLESGGGIVQPGGSLKLSCAASGFTFNTYAMNWVRQAPGKGLEWVARIRSKYNNYATYYADSVKDRFTISRDDSKNTVYLQMNNLKTEDTAVYYCVRHENFGNSYVSWFAHWGQGTLVTVSSGTAEAASASGEAGRSANHTPAGLTGPPGSPAGSPTSTEEGTSESATPESGPGTSTEPSEGSAPGSPAGSPTSTEEGTSTEPSEGSAPGTSTEPSEGSAPGTSESATPESGPGSEPATSGSETPGSEPATSGSETPGSPAGSPTSTEEGTSESATPESGPGTSTEPSEGSAPGTSTEPSEGSAPGSPAGSPTSTEEGTSTEPSEGSAPGTSTEPSEGSAPGTSESATPESGPGTSTEPSEGSAPGTSESATPESGPGSEPATSGSETPGTSTEPSEGSAPGTSTEPSEGSAPGTSESATPESGPGTSESATPESGPGSPAGAAEPEA

SEQ ID NO: 1123 - protein, 1177 aa, Artificial Sequence
  Description of Artificial Sequence: Synthetic polypeptide
HHHHHHSPAGSPTSTEEGTSESATPESGPGTSTEPSEGSAPGTSESATPESGPGSEPATSGSETPGTSESATPESGPGSEPATSGSETPGTSESATPESGPGTSTEPSEGSAPGSPAGSPTSTEEGTSESATPESGPGSEPATSGSETPGTSESATPESGPGSPAGSPTSTEEGSPAGSPTSTEEGTSTEPSEGSAPGTSESATPESGPGTSESATPESGPGTSESATPESGPGSEPATSGSETPGSEPATSGSETPGSPAGSPTSTEEGTSTEPSEGSAPGTSTEPSEGSAPGGSAPEAGRSANHTPAGLTGPATSGSETPGTDIQMTQSPSSLSASVGDRVTITCRSTKSLLHSNGITYLYWYQQKPGKAPKLLIYQMSNLASGVPSRFSSSGSGTDFTLTISSLQPEDFATYYCAQNLEIPRTFGQGTKVEIKGATPPETGAETESPGETTGGSAESEPPGEGQVQLVQSGPGLVQPGGSVRISCAASGYTFTNYGMNWVKQAPGKGLEWMGWINTYTGESTYADSFKGRFTFSLDTSASAAYLQINSLRAEDTAVYYCARFAIKGDYWGQGTLLTVSSGGGGSELVVTQEPSHTVSPGGTVTLTCRSSTGEVTTSNYANWVQQKPGQAPRGLIGGTIKRAPGTPARFSGSLLGGKAALTLSGVQPEDEAEYYCALWYPNLWVFGGGTKLTVLGATPPETGAETESPGETTGGSAESEPPGEGEVQLLESGGGIVQPGGSLKLSCAASGFTFNTYAMNWVRQAPGKGLEWVARIRSKYNNYATYYADSVKDRFTISRDDSKNTVYLQMNNLKTEDTAVYYCVRHENFGNSYVSWFAHWGQGTLVTVSSGTAEAASASGEAGRSANHTPAGLTGPPGSPAGSPTSTEEGTSESATPESGPGTSTEPSEGSAPGSPAGSPTSTEEGTSTEPSEGSAPGTSTEPSEGSAPGTSESATPESGPGSEPATSGSETPGSEPATSGSETPGSPAGSPTSTEEGTSESATPESGPGTSTEPSEGSAPGTSTEPSEGSAPGSPAGSPTSTEEGTSTEPSEGSAPGTSTEPSEGSAPGTSESATPESGPGTSTEPSEGSAPGTSESATPESGPGSEPATSGSETPGTSTEPSEGSAPGTSTEPSEGSAPGTSESATPESGPGTSESATPESGPGSPAGAAEPEA

SEQ ID NO: 1124 - protein, 1177 aa, Artificial Sequence
  Description of Artificial Sequence: Synthetic polypeptide
HHHHHHSPAGSPTSTEEGTSESATPESGPGTSTEPSEGSAPGTSESATPESGPGSEPATSGSETPGTSESATPESGPGSEPATSGSETPGTSESATPESGPGTSTEPSEGSAPGSPAGSPTSTEEGTSESATPESGPGSEPATSGSETPGTSESATPESGPGSPAGSPTSTEEGSPAGSPTSTEEGTSTEPSEGSAPGTSESATPESGPGTSESATPESGPGTSESATPESGPGSEPATSGSETPGSEPATSGSETPGSPAGSPTSTEEGTSTEPSEGSAPGTSTEPSEGSAPGGSAPEAGRSANHTPAGLTGPATSGSETPGTDIQMTQSPSSLSASVGDRVTITCRSTKSLLHSNGITYLYWYQQKPGKAPKLLIYQMSNLASGVPSRFSSSGSGTDFTLTISSLQPEDFATYYCAQNLEIPRTFGQGTKVEIKGATPPETGAETESPGETTGGSAESEPPGEGQVQLVQSGPGLVQPGGSVRISCAASGYTFTNYGMNWVKQAPGKGLEWMGWINTYTGESTYADSFKGRFTFSLDTSASAAYLQINSLRAEDTAVYYCARFAIKGDYWGQGTLLTVSSGGGGSELVVTQEPSLTVSPGGTVTLTCRSSNGAVTSSNYANWVQQKPGQAPRGLIGGTNKRAPGTPARFSGSSLGGKAALTLSGVQPEDEAVYYCALWYPNLWVFGGGTKLTVLGATPPETGAETESPGETTGGSAESEPPGEGEVQLQESGGGIVQPGGSLKLSCAASGFTFNTYAMNWVRQAPGKGLEWVARIRSKYNNYATYYADSVKDRFTISRDDSKNTVYLQMNNLKTEDTAVYYCVRHENFGNSYVSWFAHWGQGTLVTVSSGTAEAASASGEAGRSANHTPAGLTGPPGSPAGSPTSTEEGTSESATPESGPGTSTEPSEGSAPGSPAGSPTSTEEGTSTEPSEGSAPGTSTEPSEGSAPGTSESATPESGPGSEPATSGSETPGSEPATSGSETPGSPAGSPTSTEEGTSESATPESGPGTSTEPSEGSAPGTSTEPSEGSAPGSPAGSPTSTEEGTSTEPSEGSAPGTSTEPSEGSAPGTSESATPESGPGTSTEPSEGSAPGTSESATPESGPGSEPATSGSETPGTSTEPSEGSAPGTSTEPSEGSAPGTSESATPESGPGTSESATPESGPGSPAGAAEPEA

SEQ ID NO: 1125 - protein, 1177 aa, Artificial Sequence
  Description of Artificial Sequence: Synthetic polypeptide
HHHHHHSPAGSPTSTEEGTSESATPESGPGTSTEPSEGSAPGTSESATPESGPGSEPATSGSETPGTSESATPESGPGSEPATSGSETPGTSESATPESGPGTSTEPSEGSAPGSPAGSPTSTEEGTSESATPESGPGSEPATSGSETPGTSESATPESGPGSPAGSPTSTEEGSPAGSPTSTEEGTSTEPSEGSAPGTSESATPESGPGTSESATPESGPGTSESATPESGPGSEPATSGSETPGSEPATSGSETPGSPAGSPTSTEEGTSTEPSEGSAPGTSTEPSEGSAPGGSAPEAGRSANHTPAGLTGPATSGSETPGTDIQMTQSPSSLSASVGDRVTITCRSTKSLLHSNGITYLYWYQQKPGKAPKLLIYQMSNLASGVPSRFSSSGSGTDFTLTISSLQPEDFATYYCAQNLEIPRTFGQGTKVEIKGATPPETGAETESPGETTGGSAESEPPGEGQVQLVQSGPGLVQPGGSVRISCAASGYTFTNYGMNWVKQAPGKGLEWMGWINTYTGESTYADSFKGRFTFSLDTSASAAYLQINSLRAEDTAVYYCARFAIKGDYWGQGTLLTVSSGGGGSELVVTQEPSLTVSPGGTVTLTCRSSNGAVTSSNYANWVQQKPGQAPRGLIGGTNKRAPGTPARFSGSLLGGSAALTLSGVQPEDEAVYYCALWYPNLWVFGGGTKLTVLGATPPETGAETESPGETTGGSAESEPPGEGEVQLQESGGGIVQPGGSLKLSCAASGFTFNTYAMNWVRQAPGKGLEWVARIRSKYNNYATYYADSVKDRFTISRDDSKNTVYLQMNNLKTEDTAVYYCVRHENFGNSYVSWFAHWGQGTLVTVSSGTAEAASASGEAGRSANHTPAGLTGPPGSPAGSPTSTEEGTSESATPESGPGTSTEPSEGSAPGSPAGSPTSTEEGTSTEPSEGSAPGTSTEPSEGSAPGTSESATPESGPGSEPATSGSETPGSEPATSGSETPGSPAGSPTSTEEGTSESATPESGPGTSTEPSEGSAPGTSTEPSEGSAPGSPAGSPTSTEEGTSTEPSEGSAPGTSTEPSEGSAPGTSESATPESGPGTSTEPSEGSAPGTSESATPESGPGSEPATSGSETPGTSTEPSEGSAPGTSTEPSEGSAPGTSESATPESGPGTSESATPESGPGSPAGAAEPEA

SEQ ID NO: 1126 - protein, 1177 aa, Artificial Sequence
  Description of Artificial Sequence: Synthetic polypeptide
HHHHHHSPAGSPTSTEEGTSESATPESGPGTSTEPSEGSAPGTSESATPESGPGSEPATSGSETPGTSESATPESGPGSEPATSGSETPGTSESATPESGPGTSTEPSEGSAPGSPAGSPTSTEEGTSESATPESGPGSEPATSGSETPGTSESATPESGPGSPAGSPTSTEEGSPAGSPTSTEEGTSTEPSEGSAPGTSESATPESGPGTSESATPESGPGTSESATPESGPGSEPATSGSETPGSEPATSGSETPGSPAGSPTSTEEGTSTEPSEGSAPGTSTEPSEGSAPGGSAPEAGRSANHTPAGLTGPATSGSETPGTDIQMTQSPSSLSASVGDRVTITCRSTKSLLHSNGITYLYWYQQKPGKAPKLLIYQMSNLASGVPSRFSSSGSGTDFTLTISSLQPEDFATYYCAQNLEIPRTFGQGTKVEIKGATPPETGAETESPGETTGGSAESEPPGEGQVQLVQSGPGLVQPGGSVRISCAASGYTFTNYGMNWVKQAPGKGLEWMGWINTYTGESTYADSFKGRFTFSLDTSASAAYLQINSLRAEDTAVYYCARFAIKGDYWGQGTLLTVSSGGGGSELVVTQEPSLTVSPGGTVTLTCRSSNGAVTSSNYANWVQQKPGQAPRGLIGGTNKRAPGTPARFSGSSLGGSAALTLSGVQPEDEAVYYCALWYPNLWVFGGGTKLTVLGATPPETGAETESPGETTGGSAESEPPGEGEVQLQESGGGIVQPGGSLKLSCAASGFTFNTYAMNWVRQAPGKGLEWVARIRSKYNNYATYYADSVKDRFTISRDDSKNTVYLQMNNLKTEDTAVYYCVRHENFGNSYVSWFAHWGQGTLVTVSSGTAEAASASGEAGRSANHTPAGLTGPPGSPAGSPTSTEEGTSESATPESGPGTSTEPSEGSAPGSPAGSPTSTEEGTSTEPSEGSAPGTSTEPSEGSAPGTSESATPESGPGSEPATSGSETPGSEPATSGSETPGSPAGSPTSTEEGTSESATPESGPGTSTEPSEGSAPGTSTEPSEGSAPGSPAGSPTSTEEGTSTEPSEGSAPGTSTEPSEGSAPGTSESATPESGPGTSTEPSEGSAPGTSESATPESGPGSEPATSGSETPGTSTEPSEGSAPGTSTEPSEGSAPGTSESATPESGPGTSESATPESGPGSPAGAAEPEA

SEQ ID NO: 1127 - protein, 1177 aa, Artificial Sequence
  Description of Artificial Sequence: Synthetic polypeptide
HHHHHHSPAGSPTSTEEGTSESATPESGPGTSTEPSEGSAPGTSESATPESGPGSEPATSGSETPGTSESATPESGPGSEPATSGSETPGTSESATPESGPGTSTEPSEGSAPGSPAGSPTSTEEGTSESATPESGPGSEPATSGSETPGTSESATPESGPGSPAGSPTSTEEGSPAGSPTSTEEGTSTEPSEGSAPGTSESATPESGPGTSESATPESGPGTSESATPESGPGSEPATSGSETPGSEPATSGSETPGSPAGSPTSTEEGTSTEPSEGSAPGTSTEPSEGSAPGGSAPEAGRSANHTPAGLTGPATSGSETPGTDIQMTQSPSSLSASVGDRVTITCRSTKSLLHSNGITYLYWYQQKPGKAPKLLIYQMSNLASGVPSRFSSSGSGTDFTLTISSLQPEDFATYYCAQNLEIPRTFGQGTKVEIKGATPPETGAETESPGETTGGSAESEPPGEGQVQLVQSGPGLVQPGGSVRISCAASGYTFTNYGMNWVKQAPGKGLEWMGWINTYTGESTYADSFKGRFTFSLDTSASAAYLQINSLRAEDTAVYYCARFAIKGDYWGQGTLLTVSSGGGGSELVVTQEPSLTVSPGGTVTLTCRSSTGAVTTSNYANWVQQKPGQAPRGLIGGTNKRAPGTPARFSGSSLGGSAALTLSGVQPEDEAEYYCALWYSNLWVFGGGTKLTVLGATPPETGAETESPGETTGGSAESEPPGEGEVQLQESGGGLVQPGGSLKLSCAASGFTFNTYAMNWVRQAPGKGLEWVARIRSKYNNYATYYADSVKDRFTISRDDSKNTAYLQMNNLKTEDTAVYYCVRHGNFGNSYVSWFAYWGQGTLVTVSSGTAEAASASGEAGRSANHTPAGLTGPPGSPAGSPTSTEEGTSESATPESGPGTSTEPSEGSAPGSPAGSPTSTEEGTSTEPSEGSAPGTSTEPSEGSAPGTSESATPESGPGSEPATSGSETPGSEPATSGSETPGSPAGSPTSTEEGTSESATPESGPGTSTEPSEGSAPGTSTEPSEGSAPGSPAGSPTSTEEGTSTEPSEGSAPGTSTEPSEGSAPGTSESATPESGPGTSTEPSEGSAPGTSESATPESGPGSEPATSGSETPGTSTEPSEGSAPGTSTEPSEGSAPGTSESATPESGPGTSESATPESGPGSPAGAAEPEA

SEQ ID NO: 1128 - protein, 1461 aa, Artificial Sequence
  Description of Artificial Sequence: Synthetic polypeptide
HHHHHHSPAGSPTSTEEGTSESATPESGPGTSTEPSEGSAPGTSESATPESGPGSEPATSGSETPGTSESATPESGPGSEPATSGSETPGTSESATPESGPGTSTEPSEGSAPGSPAGSPTSTEEGTSESATPESGPGSEPATSGSETPGTSESATPESGPGSPAGSPTSTEEGSPAGSPTSTEEGTSTEPSEGSAPGTSESATPESGPGTSESATPESGPGTSESATPESGPGSEPATSGSETPGSEPATSGSETPGSPAGSPTSTEEGTSTEPSEGSAPGTSTEPSEGSAPGGSAPEAGRSANHTPAGLTGPATSGSETPGTDIQMTQSPSSLSASVGDRVTITCRSTKSLLHSNGITYLYWYQQKPGKAPKLLIYQMSNLASGVPSRFSSSGSGTDFTLTISSLQPEDFATYYCAQNLEIPRTFGQGTKVEIKGATPPETGAETESPGETTGGSAESEPPGEGQVQLVQSGPGLVQPGGSVRISCAASGYTFTNYGMNWVKQAPGKGLEWMGWINTYTGESTYADSFKGRFTFSLDTSASAAYLQINSLRAEDTAVYYCARFAIKGDYWGQGTLLTVSSGGGGSELVVTQEPSLTVSPGGTVTLTCRSSNGAVTSSNYANWVQQKPGQAPRGLIGGTNKRAPGTPARFSGSLLGGKAALTLSGVQPEDEAVYYCALWYPNLWVFGGGTKLTVLGATPPETGAETESPGETTGGSAESEPPGEGEVQLLESGGGIVQPGGSLKLSCAASGFTFNTYAMNWVRQAPGKGLEWVARIRSKYNNYATYYADSVKDRFTISRDDSKNTVYLQMNNLKTEDTAVYYCVRHENFGNSYVSWFAHWGQGTLVTVSSGTAEAASASGEAGRSANHTPAGLTGPPGSPAGSPTSTEEGTSESATPESGPGTSTEPSEGSAPGSPAGSPTSTEEGTSTEPSEGSAPGTSTEPSEGSAPGTSESATPESGPGSEPATSGSETPGSEPATSGSETPGSPAGSPTSTEEGTSESATPESGPGTSTEPSEGSAPGTSTEPSEGSAPGSPAGSPTSTEEGTSTEPSEGSAPGTSTEPSEGSAPGTSESATPESGPGTSTEPSEGSAPGTSESATPESGPGSEPATSGSETPGTSTEPSEGSAPGTSTEPSEGSAPGTSESATPESGPGTSESATPESGPGSPAGSPTSTEEGTSESATPESGPGSEPATSGSETPGTSESATPESGPGTSTEPSEGSAPGTSTEPSEGSAPGTSTEPSEGSAPGTSTEPSEGSAPGTSTEPSEGSAPGTSTEPSEGSAPGSPAGSPTSTEEGTSTEPSEGSAPGTSESATPESGPGSEPATSGSETPGTSESATPESGPGSEPATSGSETPGTSESATPESGPGTSTEPSEGSAPGTSESATPESGPGSPAGSPTSTEEGSPAGSPTSTEEGSPAGSPTSTEEGTSESATPESGPGTSTEPSEGSAPGAAEPEA

SEQ ID NO: 1129 - protein, 1461 aa, Artificial Sequence
  Description of Artificial Sequence: Synthetic polypeptide
HHHHHHSPAGSPTSTEEGTSESATPESGPGTSTEPSEGSAPGTSESATPESGPGSEPATSGSETPGTSESATPESGPGSEPATSGSETPGTSESATPESGPGTSTEPSEGSAPGSPAGSPTSTEEGTSESATPESGPGSEPATSGSETPGTSESATPESGPGSPAGSPTSTEEGSPAGSPTSTEEGTSTEPSEGSAPGTSESATPESGPGTSESATPESGPGTSESATPESGPGSEPATSGSETPGSEPATSGSETPGSPAGSPTSTEEGTSTEPSEGSAPGTSTEPSEGSAPGGSAPEAGRSANHTPAGLTGPATSGSETPGTDIQMTQSPSSLSASVGDRVTITCRSTKSLLHSNGITYLYWYQQKPGKAPKLLIYQMSNLASGVPSRFSSSGSGTDFTLTISSLQPEDFATYYCAQNLEIPRTFGQGTKVEIKGATPPETGAETESPGETTGGSAESEPPGEGQVQLVQSGPGLVQPGGSVRISCAASGYTFTNYGMNWVKQAPGKGLEWMGWINTYTGESTYADSFKGRFTFSLDTSASAAYLQINSLRAEDTAVYYCARFAIKGDYWGQGTLLTVSSGGGGSELVVTQEPSLTVSPGGTVTLTCRSSNGEVTTSNYANWVQQKPGQAPRGLIGGTIKRAPGTPARFSGSLLGGKAALTLSGVQPEDEAVYYCALWYPNLWVFGGGTKLTVLGATPPETGAETESPGETTGGSAESEPPGEGEVQLLESGGGIVQPGGSLKLSCAASGFTFNTYAMNWVRQAPGKGLEWVARIRSKYNNYATYYADSVKDRFTISRDDSKNTVYLQMNNLKTEDTAVYYCVRHENFGNSYVSWFAHWGQGTLVTVSSGTAEAASASGEAGRSANHTPAGLTGPPGSPAGSPTSTEEGTSESATPESGPGTSTEPSEGSAPGSPAGSPTSTEEGTSTEPSEGSAPGTSTEPSEGSAPGTSESATPESGPGSEPATSGSETPGSEPATSGSETPGSPAGSPTSTEEGTSESATPESGPGTSTEPSEGSAPGTSTEPSEGSAPGSPAGSPTSTEEGTSTEPSEGSAPGTSTEPSEGSAPGTSESATPESGPGTSTEPSEGSAPGTSESATPESGPGSEPATSGSETPGTSTEPSEGSAPGTSTEPSEGSAPGTSESATPESGPGTSESATPESGPGSPAGSPTSTEEGTSESATPESGPGSEPATSGSETPGTSESATPESGPGTSTEPSEGSAPGTSTEPSEGSAPGTSTEPSEGSAPGTSTEPSEGSAPGTSTEPSEGSAPGTSTEPSEGSAPGSPAGSPTSTEEGTSTEPSEGSAPGTSESATPESGPGSEPATSGSETPGTSESATPESGPGSEPATSGSETPGTSESATPESGPGTSTEPSEGSAPGTSESATPESGPGSPAGSPTSTEEGSPAGSPTSTEEGSPAGSPTSTEEGTSESATPESGPGTSTEPSEGSAPGAAEPEA

SEQ ID NO: 1130 - protein, 1461 aa, Artificial Sequence
  Description of Artificial Sequence: Synthetic polypeptide
HHHHHHSPAGSPTSTEEGTSESATPESGPGTSTEPSEGSAPGTSESATPESGPGSEPATSGSETPGTSESATPESGPGSEPATSGSETPGTSESATPESGPGTSTEPSEGSAPGSPAGSPTSTEEGTSESATPESGPGSEPATSGSETPGTSESATPESGPGSPAGSPTSTEEGSPAGSPTSTEEGTSTEPSEGSAPGTSESATPESGPGTSESATPESGPGTSESATPESGPGSEPATSGSETPGSEPATSGSETPGSPAGSPTSTEEGTSTEPSEGSAPGTSTEPSEGSAPGGSAPEAGRSANHTPAGLTGPATSGSETPGTDIQMTQSPSSLSASVGDRVTITCRSTKSLLHSNGITYLYWYQQKPGKAPKLLIYQMSNLASGVPSRFSSSGSGTDFTLTISSLQPEDFATYYCAQNLEIPRTFGQGTKVEIKGATPPETGAETESPGETTGGSAESEPPGEGQVQLVQSGPGLVQPGGSVRISCAASGYTFTNYGMNWVKQAPGKGLEWMGWINTYTGESTYADSFKGRFTFSLDTSASAAYLQINSLRAEDTAVYYCARFAIKGDYWGQGTLLTVSSGGGGSELVVTQEPSHTVSPGGTVTLTCRSSTGAVTSSNYANWVQQKPGQAPRGLIGGTIKRAPGTPARFSGSLLGGKAALTLSGVQPEDEAEYYCALWYPNLWVFGGGTKLTVLGATPPETGAETESPGETTGGSAESEPPGEGEVQLLESGGGIVQPGGSLKLSCAASGFTFNTYAMNWVRQAPGKGLEWVARIRSKYNNYATYYADSVKDRFTISRDDSKNTVYLQMNNLKTEDTAVYYCVRHENFGNSYVSWFAHWGQGTLVTVSSGTAEAASASGEAGRSANHTPAGLTGPPGSPAGSPTSTEEGTSESATPESGPGTSTEPSEGSAPGSPAGSPTSTEEGTSTEPSEGSAPGTSTEPSEGSAPGTSESATPESGPGSEPATSGSETPGSEPATSGSETPGSPAGSPTSTEEGTSESATPESGPGTSTEPSEGSAPGTSTEPSEGSAPGSPAGSPTSTEEGTSTEPSEGSAPGTSTEPSEGSAPGTSESATPESGPGTSTEPSEGSAPGTSESATPESGPGSEPATSGSETPGTSTEPSEGSAPGTSTEPSEGSAPGTSESATPESGPGTSESATPESGPGSPAGSPTSTEEGTSESATPESGPGSEPATSGSETPGTSESATPESGPGTSTEPSEGSAPGTSTEPSEGSAPGTSTEPSEGSAPGTSTEPSEGSAPGTSTEPSEGSAPGTSTEPSEGSAPGSPAGSPTSTEEGTSTEPSEGSAPGTSESATPESGPGSEPATSGSETPGTSESATPESGPGSEPATSGSETPGTSESATPESGPGTSTEPSEGSAPGTSESATPESGPGSPAGSPTSTEEGSPAGSPTSTEEGSPAGSPTSTEEGTSESATPESGPGTSTEPSEGSAPGAAEPEA

SEQ ID NO: 1131 - protein, 1461 aa, Artificial Sequence
  Description of Artificial Sequence: Synthetic polypeptide
HHHHHHSPAGSPTSTEEGTSESATPESGPGTSTEPSEGSAPGTSESATPESGPGSEPATSGSETPGTSESATPESGPGSEPATSGSETPGTSESATPESGPGTSTEPSEGSAPGSPAGSPTSTEEGTSESATPESGPGSEPATSGSETPGTSESATPESGPGSPAGSPTSTEEGSPAGSPTSTEEGTSTEPSEGSAPGTSESATPESGPGTSESATPESGPGTSESATPESGPGSEPATSGSETPGSEPATSGSETPGSPAGSPTSTEEGTSTEPSEGSAPGTSTEPSEGSAPGGSAPEAGRSANHTPAGLTGPATSGSETPGTDIQMTQSPSSLSASVGDRVTITCRSTKSLLHSNGITYLYWYQQKPGKAPKLLIYQMSNLASGVPSRFSSSGSGTDFTLTISSLQPEDFATYYCAQNLEIPRTFGQGTKVEIKGATPPETGAETESPGETTGGSAESEPPGEGQVQLVQSGPGLVQPGGSVRISCAASGYTFTNYGMNWVKQAPGKGLEWMGWINTYTGESTYADSFKGRFTFSLDTSASAAYLQINSLRAEDTAVYYCARFAIKGDYWGQGTLLTVSSGGGGSELVVTQEPSHTVSPGGTVTLTCRSSTGEVTTSNYANWVQQKPGQAPRGLIGGTIKRAPGTPARFSGSLLGGKAALTLSGVQPEDEAEYYCALWYPNLWVFGGGTKLTVLGATPPETGAETESPGETTGGSAESEPPGEGEVQLLESGGGIVQPGGSLKLSCAASGFTFNTYAMNWVRQAPGKGLEWVARIRSKYNNYATYYADSVKDRFTISRDDSKNTVYLQMNNLKTEDTAVYYCVRHENFGNSYVSWFAHWGQGTLVTVSSGTAEAASASGEAGRSANHTPAGLTGPPGSPAGSPTSTEEGTSESATPESGPGTSTEPSEGSAPGSPAGSPTSTEEGTSTEPSEGSAPGTSTEPSEGSAPGTSESATPESGPGSEPATSGSETPGSEPATSGSETPGSPAGSPTSTEEGTSESATPESGPGTSTEPSEGSAPGTSTEPSEGSAPGSPAGSPTSTEEGTSTEPSEGSAPGTSTEPSEGSAPGTSESATPESGPGTSTEPSEGSAPGTSESATPESGPGSEPATSGSETPGTSTEPSEGSAPGTSTEPSEGSAPGTSESATPESGPGTSESATPESGPGSPAGSPTSTEEGTSESATPESGPGSEPATSGSETPGTSESATPESGPGTSTEPSEGSAPGTSTEPSEGSAPGTSTEPSEGSAPGTSTEPSEGSAPGTSTEPSEGSAPGTSTEPSEGSAPGSPAGSPTSTEEGTSTEPSEGSAPGTSESATPESGPGSEPATSGSETPGTSESATPESGPGSEPATSGSETPGTSESATPESGPGTSTEPSEGSAPGTSESATPESGPGSPAGSPTSTEEGSPAGSPTSTEEGSPAGSPTSTEEGTSESATPESGPGTSTEPSEGSAPGAAEPEA

SEQ ID NO: 1132 - protein, 1461 aa, Artificial Sequence
  Description of Artificial Sequence: Synthetic polypeptide
HHHHHHSPAGSPTSTEEGTSESATPESGPGTSTEPSEGSAPGTSESATPESGPGSEPATSGSETPGTSESATPESGPGSEPATSGSETPGTSESATPESGPGTSTEPSEGSAPGSPAGSPTSTEEGTSESATPESGPGSEPATSGSETPGTSESATPESGPGSPAGSPTSTEEGSPAGSPTSTEEGTSTEPSEGSAPGTSESATPESGPGTSESATPESGPGTSESATPESGPGSEPATSGSETPGSEPATSGSETPGSPAGSPTSTEEGTSTEPSEGSAPGTSTEPSEGSAPGGSAPEAGRSANHTPAGLTGPATSGSETPGTDIQMTQSPSSLSASVGDRVTITCRSTKSLLHSNGITYLYWYQQKPGKAPKLLIYQMSNLASGVPSRFSSSGSGTDFTLTISSLQPEDFATYYCAQNLEIPRTFGQGTKVEIKGATPPETGAETESPGETTGGSAESEPPGEGQVQLVQSGPGLVQPGGSVRISCAASGYTFTNYGMNWVKQAPGKGLEWMGWINTYTGESTYADSFKGRFTFSLDTSASAAYLQINSLRAEDTAVYYCARFAIKGDYWGQGTLLTVSSGGGGSELVVTQEPSLTVSPGGTVTLTCRSSNGAVTSSNYANWVQQKPGQAPRGLIGGTNKRAPGTPARFSGSSLGGKAALTLSGVQPEDEAVYYCALWYPNLWVFGGGTKLTVLGATPPETGAETESPGETTGGSAESEPPGEGEVQLQESGGGIVQPGGSLKLSCAASGFTFNTYAMNWVRQAPGKGLEWVARIRSKYNNYATYYADSVKDRFTISRDDSKNTVYLQMNNLKTEDTAVYYCVRHENFGNSYVSWFAHWGQGTLVTVSSGTAEAASASGEAGRSANHTPAGLTGPPGSPAGSPTSTEEGTSESATPESGPGTSTEPSEGSAPGSPAGSPTSTEEGTSTEPSEGSAPGTSTEPSEGSAPGTSESATPESGPGSEPATSGSETPGSEPATSGSETPGSPAGSPTSTEEGTSESATPESGPGTSTEPSEGSAPGTSTEPSEGSAPGSPAGSPTSTEEGTSTEPSEGSAPGTSTEPSEGSAPGTSESATPESGPGTSTEPSEGSAPGTSESATPESGPGSEPATSGSETPGTSTEPSEGSAPGTSTEPSEGSAPGTSESATPESGPGTSESATPESGPGSPAGSPTSTEEGTSESATPESGPGSEPATSGSETPGTSESATPESGPGTSTEPSEGSAPGTSTEPSEGSAPGTSTEPSEGSAPGTSTEPSEGSAPGTSTEPSEGSAPGTSTEPSEGSAPGSPAGSPTSTEEGTSTEPSEGSAPGTSESATPESGPGSEPATSGSETPGTSESATPESGPGSEPATSGSETPGTSESATPESGPGTSTEPSEGSAPGTSESATPESGPGSPAGSPTSTEEGSPAGSPTSTEEGSPAGSPTSTEEGTSESATPESGPGTSTEPSEGSAPGAAEPEA

SEQ ID NO: 1133 - protein, 1461 aa, Artificial Sequence
  Description of Artificial Sequence: Synthetic polypeptide
HHHHHHSPAGSPTSTEEGTSESATPESGPGTSTEPSEGSAPGTSESATPESGPGSEPATSGSETPGTSESATPESGPGSEPATSGSETPGTSESATPESGPGTSTEPSEGSAPGSPAGSPTSTEEGTSESATPESGPGSEPATSGSETPGTSESATPESGPGSPAGSPTSTEEGSPAGSPTSTEEGTSTEPSEGSAPGTSESATPESGPGTSESATPESGPGTSESATPESGPGSEPATSGSETPGSEPATSGSETPGSPAGSPTSTEEGTSTEPSEGSAPGTSTEPSEGSAPGGSAPEAGRSANHTPAGLTGPATSGSETPGTDIQMTQSPSSLSASVGDRVTITCRSTKSLLHSNGITYLYWYQQKPGKAPKLLIYQMSNLASGVPSRFSSSGSGTDFTLTISSLQPEDFATYYCAQNLEIPRTFGQGTKVEIKGATPPETGAETESPGETTGGSAESEPPGEGQVQLVQSGPGLVQPGGSVRISCAASGYTFTNYGMNWVKQAPGKGLEWMGWINTYTGESTYADSFKGRFTFSLDTSASAAYLQINSLRAEDTAVYYCARFAIKGDYWGQGTLLTVSSGGGGSELVVTQEPSLTVSPGGTVTLTCRSSNGAVTSSNYANWVQQKPGQAPRGLIGGTNKRAPGTPARFSGSLLGGSAALTLSGVQPEDEAVYYCALWYPNLWVFGGGTKLTVLGATPPETGAETESPGETTGGSAESEPPGEGEVQLQESGGGIVQPGGSLKLSCAASGFTFNTYAMNWVRQAPGKGLEWVARIRSKYNNYATYYADSVKDRFTISRDDSKNTVYLQMNNLKTEDTAVYYCVRHENFGNSYVSWFAHWGQGTLVTVSSGTAEAASASGEAGRSANHTPAGLTGPPGSPAGSPTSTEEGTSESATPESGPGTSTEPSEGSAPGSPAGSPTSTEEGTSTEPSEGSAPGTSTEPSEGSAPGTSESATPESGPGSEPATSGSETPGSEPATSGSETPGSPAGSPTSTEEGTSESATPESGPGTSTEPSEGSAPGTSTEPSEGSAPGSPAGSPTSTEEGTSTEPSEGSAPGTSTEPSEGSAPGTSESATPESGPGTSTEPSEGSAPGTSESATPESGPGSEPATSGSETPGTSTEPSEGSAPGTSTEPSEGSAPGTSESATPESGPGTSESATPESGPGSPAGSPTSTEEGTSESATPESGPGSEPATSGSETPGTSESATPESGPGTSTEPSEGSAPGTSTEPSEGSAPGTSTEPSEGSAPGTSTEPSEGSAPGTSTEPSEGSAPGTSTEPSEGSAPGSPAGSPTSTEEGTSTEPSEGSAPGTSESATPESGPGSEPATSGSETPGTSESATPESGPGSEPATSGSETPGTSESATPESGPGTSTEPSEGSAPGTSESATPESGPGSPAGSPTSTEEGSPAGSPTSTEEGSPAGSPTSTEEGTSESATPESGPGTSTEPSEGSAPGAAEPEA

SEQ ID NO: 1134 - protein, 1461 aa, Artificial Sequence
  Description of Artificial Sequence: Synthetic polypeptide
HHHHHHSPAGSPTSTEEGTSESATPESGPGTSTEPSEGSAPGTSESATPESGPGSEPATSGSETPGTSESATPESGPGSEPATSGSETPGTSESATPESGPGTSTEPSEGSAPGSPAGSPTSTEEGTSESATPESGPGSEPATSGSETPGTSESATPESGPGSPAGSPTSTEEGSPAGSPTSTEEGTSTEPSEGSAPGTSESATPESGPGTSESATPESGPGTSESATPESGPGSEPATSGSETPGSEPATSGSETPGSPAGSPTSTEEGTSTEPSEGSAPGTSTEPSEGSAPGGSAPEAGRSANHTPAGLTGPATSGSETPGTDIQMTQSPSSLSASVGDRVTITCRSTKSLLHSNGITYLYWYQQKPGKAPKLLIYQMSNLASGVPSRFSSSGSGTDFTLTISSLQPEDFATYYCAQNLEIPRTFGQGTKVEIKGATPPETGAETESPGETTGGSAESEPPGEGQVQLVQSGPGLVQPGGSVRISCAASGYTFTNYGMNWVKQAPGKGLEWMGWINTYTGESTYADSFKGRFTFSLDTSASAAYLQINSLRAEDTAVYYCARFAIKGDYWGQGTLLTVSSGGGGSELVVTQEPSLTVSPGGTVTLTCRSSNGAVTSSNYANWVQQKPGQAPRGLIGGTNKRAPGTPARFSGSSLGGSAALTLSGVQPEDEAVYYCALWYPNLWVFGGGTKLTVLGATPPETGAETESPGETTGGSAESEPPGEGEVQLQESGGGIVQPGGSLKLSCAASGFTFNTYAMNWVRQAPGKGLEWVARIRSKYNNYATYYADSVKDRFTISRDDSKNTVYLQMNNLKTEDTAVYYCVRHENFGNSYVSWFAHWGQGTLVTVSSGTAEAASASGEAGRSANHTPAGLTGPPGSPAGSPTSTEEGTSESATPESGPGTSTEPSEGSAPGSPAGSPTSTEEGTSTEPSEGSAPGTSTEPSEGSAPGTSESATPESGPGSEPATSGSETPGSEPATSGSETPGSPAGSPTSTEEGTSESATPESGPGTSTEPSEGSAPGTSTEPSEGSAPGSPAGSPTSTEEGTSTEPSEGSAPGTSTEPSEGSAPGTSESATPESGPGTSTEPSEGSAPGTSESATPESGPGSEPATSGSETPGTSTEPSEGSAPGTSTEPSEGSAPGTSESATPESGPGTSESATPESGPGSPAGSPTSTEEGTSESATPESGPGSEPATSGSETPGTSESATPESGPGTSTEPSEGSAPGTSTEPSEGSAPGTSTEPSEGSAPGTSTEPSEGSAPGTSTEPSEGSAPGTSTEPSEGSAPGSPAGSPTSTEEGTSTEPSEGSAPGTSESATPESGPGSEPATSGSETPGTSESATPESGPGSEPATSGSETPGTSESATPESGPGTSTEPSEGSAPGTSESATPESGPGSPAGSPTSTEEGSPAGSPTSTEEGSPAGSPTSTEEGTSESATPESGPGTSTEPSEGSAPGAAEPEA

SEQ ID NO: 1135 - protein, 1461 aa, Artificial Sequence
  Description of Artificial Sequence: Synthetic polypeptide
HHHHHHSPAGSPTSTEEGTSESATPESGPGTSTEPSEGSAPGTSESATPESGPGSEPATSGSETPGTSESATPESGPGSEPATSGSETPGTSESATPESGPGTSTEPSEGSAPGSPAGSPTSTEEGTSESATPESGPGSEPATSGSETPGTSESATPESGPGSPAGSPTSTEEGSPAGSPTSTEEGTSTEPSEGSAPGTSESATPESGPGTSESATPESGPGTSESATPESGPGSEPATSGSETPGSEPATSGSETPGSPAGSPTSTEEGTSTEPSEGSAPGTSTEPSEGSAPGGSAPEAGRSANHTPAGLTGPATSGSETPGTDIQMTQSPSSLSASVGDRVTITCRSTKSLLHSNGITYLYWYQQKPGKAPKLLIYQMSNLASGVPSRFSSSGSGTDFTLTISSLQPEDFATYYCAQNLEIPRTFGQGTKVEIKGATPPETGAETESPGETTGGSAESEPPGEGQVQLVQSGPGLVQPGGSVRISCAASGYTFTNYGMNWVKQAPGKGLEWMGWINTYTGESTYADSFKGRFTFSLDTSASAAYLQINSLRAEDTAVYYCARFAIKGDYWGQGTLLTVSSGGGGSELVVTQEPSLTVSPGGTVTLTCRSSTGAVTTSNYANWVQQKPGQAPRGLIGGTNKRAPGTPARFSGSSLGGSAALTLSGVQPEDEAEYYCALWYSNLWVFGGGTKLTVLGATPPETGAETESPGETTGGSAESEPPGEGEVQLQESGGGLVQPGGSLKLSCAASGFTFNTYAMNWVRQAPGKGLEWVARIRSKYNNYATYYADSVKDRFTISRDDSKNTAYLQMNNLKTEDTAVYYCVRHGNFGNSYVSWFAYWGQGTLVTVSSGTAEAASASGEAGRSANHTPAGLTGPPGSPAGSPTSTEEGTSESATPESGPGTSTEPSEGSAPGSPAGSPTSTEEGTSTEPSEGSAPGTSTEPSEGSAPGTSESATPESGPGSEPATSGSETPGSEPATSGSETPGSPAGSPTSTEEGTSESATPESGPGTSTEPSEGSAPGTSTEPSEGSAPGSPAGSPTSTEEGTSTEPSEGSAPGTSTEPSEGSAPGTSESATPESGPGTSTEPSEGSAPGTSESATPESGPGSEPATSGSETPGTSTEPSEGSAPGTSTEPSEGSAPGTSESATPESGPGTSESATPESGPGSPAGSPTSTEEGTSESATPESGPGSEPATSGSETPGTSESATPESGPGTSTEPSEGSAPGTSTEPSEGSAPGTSTEPSEGSAPGTSTEPSEGSAPGTSTEPSEGSAPGTSTEPSEGSAPGSPAGSPTSTEEGTSTEPSEGSAPGTSESATPESGPGSEPATSGSETPGTSESATPESGPGSEPATSGSETPGTSESATPESGPGTSTEPSEGSAPGTSESATPESGPGSPAGSPTSTEEGSPAGSPTSTEEGSPAGSPTSTEEGTSESATPESGPGTSTEPSEGSAPGAAEPEA

SEQ ID NO: 1136 - protein, 561 aa, Artificial Sequence
  Description of Artificial Sequence: Synthetic polypeptide
LTGPATSGSETPGTDIQMTQSPSSLSASVGDRVTITCKASQDVSIGVAWYQQKPGKAPKLLIYSASYRYTGVPSRFSGSGSGTDFTLTISSLQPEDFATYYCQQYYIYPYTFGQGTKVEIKGATPPETGAETESPGETTGGSAESEPPGEGEVQLVESGGGLVQPGGSLRLSCAASGFTFTDYTMDWVRQAPGKGLEWVADVNPNSGGSIYNQRFKGRFTLSVDRSKNTLYLQMNSLRAEDTAVYYCARNLGPSFYFDYWGQGTLVTVSSGGGGSELVVTQEPSLTVSPGGTVTLTCRSSNGAVTSSNYANWVQQKPGQAPRGLIGGTNKRAPGTPARFSGSLLGGKAALTLSGVQPEDEAVYYCALWYPNLWVFGGGTKLTVLGATPPETGAETESPGETTGGSAESEPPGEGEVQLLESGGGIVQPGGSLKLSCAASGFTFNTYAMNWVRQAPGKGLEWVARIRSKYNNYATYYADSVKDRFTISRDDSKNTVYLQMNNLKTEDTAVYYCVRHENFGNSYVSWFAHWGQGTLVTVSSGTAEAASASGEAGRSANHTPAG

SEQ ID NO: 1137 - DNA, 5229 bp, Artificial Sequence
  Description of Artificial Sequence: Synthetic polynucleotide
caccatcatcaccatcactccccagcaggcagcccgaccagcaccgaggagggtacgagcgagtcggctactccagagagcggtccgggtacctctacggaaccgtccgaaggtagcgctccaggcacgtctgaaagcgcgacgccggaaagcggtccaggcagcgagccggcgacctccggtagcgaaacgcctggtacctcggagtcagcgactccggaaagcggtccgggtagcgaacctgcaacgagcggtagcgagactccaggcactagcgaatccgcaactccggagtcgggtccgggcacctctacggagcctagcgagggctcagcaccaggtagccctgcaggttccccgacgtcaaccgaggaaggtacaagcgaaagcgccacccctgagtcgggccctggcagcgaaccggcaactagcggcagcgagactccgggtaccagcgagtctgctacgccagagagcggcccaggttcgccagcgggttcgccgactagcacggaggagggcagcccagcgggtagcccgaccagcactgaggagggtacgtccaccgaaccgagcgaaggtagcgcaccaggtacctccgagtctgccacccctgaatccggtccaggtaccagcgaatcagccaccccggagtcgggtccaggtacgagcgaatctgctaccccggaatccggcccaggcagcgaacctgctactagcggcagcgaaacgccgggcagcgaacctgccacgtcaggcagcgagacgccgggttcccctgcaggctccccgaccagcactgaggagggcacctccaccgaaccatcagaaggtagcgcgcctggtacgtcaaccgaaccttccgagggcagcgcaccgggtggctcagcgcctgaggcaggtcgttctgctaaccatacccctgcaggattaactggccccgccaccagcgggagcgagacccccgggactgacattcagatgactcagtctccgtcctccctgtctgcgagcgtgggcgaccgtgtgactattacctgtaaagcctcccaggacgtgtctatcggtgtggcatggtatcaacaaaagccgggtaaggcacctaaactgctgatctactccgcttcttaccgttacacgggcgttccgtcccgttttagcggttccggtagcggtactgattttaccctgactatttcctccctgcaaccagaagactttgcgacctattactgtcagcaatactatatttacccgtataccttcggccagggcactaaggttgaaattaaaggtgcaacgcctccggagactggtgctgaaactgagtccccgggcgagacgaccggtggctctgctgaatccgaaccaccgggcgaaggcgaggttcagctggtggagtctggcggcggtctggtacagccgggtggtagcctgcgtctgagctgcgcggcgtccggtttcactttcaccgattataccatggactgggttcgccaggcaccgggcaagggtctggaatgggtggcggacgtgaacccgaactccggtggttctatctacaaccagcgtttcaaaggtcgtttcacgctgagcgtagatcgtagcaaaaacactctgtacctgcagatgaactccctgcgcgcagaagacaccgcggtgtattactgtgcacgtaacctgggcccgtccttctatttcgactactggggtcaaggtactctggtaactgtttcctctggtggtggcggcagcgagttagttgtgacccaagagccgagcctgaccgttagcccgggtggtacggtcaccctgacgtgccgtagcagcaacggtgcggtcacgagcagcaactatgccaattgggtccagcagaaaccgggtcaagcaccgcgtggcctgatcggcggcaccaataaacgtgccccgggtactcctgcgcgtttctccggtagcctgctgggcggcaaagccgctctgaccctgagcggtgtccagccggaagatgaagcggtgtactactgcgcgctgtggtatccgaatctgtgggtttttggcggcggtaccaagctgaccgtattgggtgctacgccaccggagactggcgcagaaacggaaagcccgggtgagactacgggtggctctgcggagagcgaacctccgggtgagggtgaggtccaactgctggagtctggtggtggcattgttcaaccgggtggctcgttgaagctgagctgtgcagctagcggctttaccttcaacacctatgcgatgaattgggttcgtcaggcaccgggtaagggcctggaatgggtggcgcgtatccgctccaagtacaacaactacgcgacctactacgcggatagcgttaaagaccgcttcacgattagccgtgacgattccaagaatacggtgtatctgcaaatgaacaatctgaaaaccgaagataccgcggtgtattactgtgtgcgccacgaaaatttcggcaacagctacgtgagctggtttgcacattggggtcagggcaccctggttacggtgagctccgggactgctgaggcggctagcgcctgtggagaagctggaagaagcgccaatcacacaccagctggacttacaggcccgcctggtagccccgcggggagccctacaagcactgaggagggcacatctgagtccgctacccctgagagtggacccgggacaagcactgagcctagcgaaggaagcgcaccaggttcccccgctgggagccccacaagcacagaagagggaacttctaccgagccctctgagggctcagcccctggaactagcacagagccctccgaaggcagtgcaccgggtacttccgaaagcgcaactccggaatccggccctggttctgagcctgctacttccggctctgaaactccaggtagcgagccagcgacttctggttctgaaactccaggttcaccggcgggtagcccgacgagcacggaggaaggtacctctgagtcggccactcctgagtccggtccgggcacgagcaccgagccgagcgagggttcagccccgggtaccagcacggagccgtccgagggtagcgcaccgggttctccggcgggctcccctacgtctacggaagagggtacgtccactgaacctagcgagggcagcgcgccaggcaccagcactgaaccgagcgaaggcagcgcacctggcactagcgagtctgcgactccggagagcggtccgggtacgagcacggaaccaagcgaaggcagcgccccaggtacctctgaatctgctaccccagaatctggcccgggttccgagccagctacctctggttctgaaaccccaggtacttccactgaaccaagcgaaggtagcgctcctggcacttctactgaaccatccgaaggttccgctcctggtacgtctgaaagcgctacccctgaaagcggcccaggcacctctgaaagcgctactcctgagagcggtccaggctctccagcaggttctccaacctccactgaagaaggcacctctgagtctgctacccctgaatctggtcctggctccgaacctgctacctctggttccgaaactccaggtacctcggaatctgcgactccggaatctggcccgggcacgagcacggagccgtctgagggtagcgcaccaggtaccagcactgagccttctgagggctctgcaccgggtacctccacggaaccttcggaaggttctgcgccgggtacctccactgagccatccgagggttcagcaccaggtactagcacggaaccgtccgagggctctgcaccaggtacgagcaccgaaccgtcggagggtagcgctccaggtagcccagcgggctctccgacaagcaccgaagaaggcaccagcaccgagccgtccgaaggttccgcaccaggtacaagcgagagcgcgactcctgaatctggtccgggtagcgagcctgcaaccagcggttctgagacgccgggcacttccgaatctgcgaccccggagtccggtccaggttcagagccggcgacgagcggttcggaaacgccgggtacgtctgaatcagccacgccggagtctggtccgggtacctcgaccgaaccaagcgaaggttcggcaccgggtactagcgagagcgcaacccctgaaagcggtccgggcagcccggcaggttctccaaccagcaccgaagaaggttcccctgctggtagcccgacctctacggaggaaggtagccctgcaggttccccaacttctactgaggaaggtacttctgagtccgctaccccagaaagcggtcctggtacctccactgaaccgtctgaaggctctgcaccaggcacttctgagtctgctactccagaaagcggcccaggttctgaaccagcaacttctggctctgagactccaggcacttctgagtccgcaacgcctgaatccggtcctggttctgaaccagctacttccggcagcgaaaccccaggtacctctgagtctgcgactccagagtctggtcctggtacttccactgagcctagcgagggttccgcaccaggttctccggctggtagcccgaccagcacggaggagggtacgtctgaatctgcaacgccggaatcgggcccaggttcggagcctgcaacgtctggcagcgaaaccccgggtacctccgaatctgctacaccggaaagcggtcctggcagccctgctggttctccaacctctaccgaggagggttcaccggcaggtagcccgactagcactgaagaaggtactagcacggagccgagcgagggtagtgctccgggtacgagcgagagcgcaacgccagagagcggtccaggcaccagcgaatcggccacccctgagagcggcccaggtacttctgagagcgccactcctgaatccggccctggtagcgagccggcaacctccggctcagaaactcctggttcggaaccagcgaccagcggttctgaaactccgggtagcccggcaggcagcccaacgagcaccgaagagggtaccagcacggaaccgagcgagggttctgccccgggtacttccaccgaaccatcggagggctctgcacctggtagcgaacctgcgacgtctggttctgaaacgccgggtaccagcgaaagcgctaccccagaatccggtccgggcactagcaccgagccatcggagggcgccgcagaaccagaggcg

SEQ ID NO: 1138 - protein, 1743 aa, Artificial Sequence
  Description of Artificial Sequence: Synthetic polypeptide
HHHHHHSPAGSPTSTEEGTSESATPESGPGTSTEPSEGSAPGTSESATPESGPGSEPATSGSETPGTSESATPESGPGSEPATSGSETPGTSESATPESGPGTSTEPSEGSAPGSPAGSPTSTEEGTSESATPESGPGSEPATSGSETPGTSESATPESGPGSPAGSPTSTEEGSPAGSPTSTEEGTSTEPSEGSAPGTSESATPESGPGTSESATPESGPGTSESATPESGPGSEPATSGSETPGSEPATSGSETPGSPAGSPTSTEEGTSTEPSEGSAPGTSTEPSEGSAPGGSAPEAGRSANHTPAGLTGPATSGSETPGTDIQMTQSPSSLSASVGDRVTITCKASQDVSIGVAWYQQKPGKAPKLLIYSASYRYTGVPSRFSGSGSGTDFTLTISSLQPEDFATYYCQQYYIYPYTFGQGTKVEIKGATPPETGAETESPGETTGGSAESEPPGEGEVQLVESGGGLVQPGGSLRLSCAASGFTFTDYTMDWVRQAPGKGLEWVADVNPNSGGSIYNQRFKGRFTLSVDRSKNTLYLQMNSLRAEDTAVYYCARNLGPSFYFDYWGQGTLVTVSSGGGGSELVVTQEPSLTVSPGGTVTLTCRSSNGAVTSSNYANWVQQKPGQAPRGLIGGTNKRAPGTPARFSGSLLGGKAALTLSGVQPEDEAVYYCALWYPNLWVFGGGTKLTVLGATPPETGAETESPGETTGGSAESEPPGEGEVQLLESGGGIVQPGGSLKLSCAASGFTFNTYAMNWVRQAPGKGLEWVARIRSKYNNYATYYADSVKDRFTISRDDSKNTVYLQMNNLKTEDTAVYYCVRHENFGNSYVSWFAHWGQGTLVTVSSGTAEAASACGEAGRSANHTPAGLTGPPGSPAGSPTSTEEGTSESATPESGPGTSTEPSEGSAPGSPAGSPTSTEEGTSTEPSEGSAPGTSTEPSEGSAPGTSESATPESGPGSEPATSGSETPGSEPATSGSETPGSPAGSPTSTEEGTSESATPESGPGTSTEPSEGSAPGTSTEPSEGSAPGSPAGSPTSTEEGTSTEPSEGSAPGTSTEPSEGSAPGTSESATPESGPGTSTEPSEGSAPGTSESATPESGPGSEPATSGSETPGTSTEPSEGSAPGTSTEPSEGSAPGTSESATPESGPGTSESATPESGPGSPAGSPTSTEEGTSESATPESGPGSEPATSGSETPGTSESATPESGPGTSTEPSEGSAPGTSTEPSEGSAPGTSTEPSEGSAPGTSTEPSEGSAPGTSTEPSEGSAPGTSTEPSEGSAPGSPAGSPTSTEEGTSTEPSEGSAPGTSESATPESGPGSEPATSGSETPGTSESATPESGPGSEPATSGSETPGTSESATPESGPGTSTEPSEGSAPGTSESATPESGPGSPAGSPTSTEEGSPAGSPTSTEEGSPAGSPTSTEEGTSESATPESGPGTSTEPSEGSAPGTSESATPESGPGSEPATSGSETPGTSESATPESGPGSEPATSGSETPGTSESATPESGPGTSTEPSEGSAPGSPAGSPTSTEEGTSESATPESGPGSEPATSGSETPGTSESATPESGPGSPAGSPTSTEEGSPAGSPTSTEEGTSTEPSEGSAPGTSESATPESGPGTSESATPESGPGTSESATPESGPGSEPATSGSETPGSEPATSGSETPGSPAGSPTSTEEGTSTEPSEGSAPGTSTEPSEGSAPGSEPATSGSETPGTSESATPESGPGTSTEPSEGAAEPEA

SEQ ID NO: 1139 - protein, 912 aa, Artificial Sequence
  Description of Artificial Sequence: Synthetic polypeptide
MKNPEQAEEQAEEQREETGKPIPNPLLGLDSTEGTSTEPSEGSAPGTSESATPESGPGTSESATPESGPGTSESATPESGPGSEPATSGSETPGSEPATSGSETPGSPAGSPTSTEEGTSTEPSEGSAPGTSTEPSEGSAPGSEPATSGSETPGTSESATPESGPGTAEAASASGEAGRSANHEPLGLVATPGSPAGSPTSTEEGTSESATPESGPGTSTEPSEGSAPGSPAGSPTSTEEGTSTEPSEGSAPGTSTEPSEGSAPGTSESATPESGPGSEPATSGSETPGSEPATSGSETPGSPAGSPTSTEEGTSESATPESGPGTSTEPSEGSAPGTSTEPSEGSAPGSPAGSPTSTEEGTSTEPSEGSAPGTSTEPSEGSAPGTSESATPESGPGTSTEPSEGSAPGTSESATPESGPGSEPATSGSETPGTSTEPSEGSAPGTSTEPSEGSAPGTSESATPESGPGTSESATPESGPGSPAGSPTSTEEGTSESATPESGPGSEPATSGSETPGTSESATPESGPGTSTEPSEGSAPGTSTEPSEGSAPGTSTEPSEGSAPGTSTEPSEGSAPGTSTEPSEGSAPGTSTEPSEGSAPGSPAGSPTSTEEGTSTEPSEGSAPGTSESATPESGPGSEPATSGSETPGTSESATPESGPGSEPATSGSETPGTSESATPESGPGTSTEPSEGSAPGTSESATPESGPGSPAGSPTSTEEGSPAGSPTSTEEGSPAGSPTSTEEGTSESATPESGPGTSTEPSEGSAPGTSESATPESGPGSEPATSGSETPGTSESATPESGPGSEPATSGSETPGTSESATPESGPGTSTEPSEGSAPGSPAGSPTSTEEGTSESATPESGPGSEPATSGSETPGTSESATPESGPGSPAGSPTSTEEGSPAHHHHHHHH

SEQ ID NO: 1140 - protein, 256 aa, Artificial Sequence
  Description of Artificial Sequence: Synthetic polypeptide
DIQMTQSPSSLSASVGDRVTITCKASQDVSIGVAWYQQKPGKAPKLLIYSASYRYTGVPSRFSGSGSGTDFTLTISSLQPEDFATYYCQQYYIYPYTFGQGTKVEIKGATPPETGAETESPGETTGGSAESEPPGEGEVQLVESGGGLVQPGGSLRLSCAASGFTFTDYTMDWVRQAPGKGLEWVADVNPNSGGSIYNQRFKGRFTLSVDRSKNTLYLQMNSLRAEDTAVYYCARNLGPSFYFDYWGQGTLVTVSS

SEQ ID NO: 1141 - protein, 264 aa, Artificial Sequence; identical to SEQ ID NO: 36
  Description of Artificial Sequence: Synthetic polypeptide

SEQ ID NO: 1142 - protein, 30 aa, Artificial Sequence
  Description of Artificial Sequence: Synthetic polypeptide
GSGEGSEGEGGGEGSEGEGSGEGGEGEGSG

SEQ ID NO: 1143 - protein, 32 aa, Artificial Sequence
  Description of Artificial Sequence: Synthetic polypeptide
TGSGEGSEGEGGGEGSEGEGSGEGGEGEGSGT

SEQ ID NO: 1144 - protein, 30 aa, Artificial Sequence
  Description of Artificial Sequence: Synthetic polypeptide
GATPPETGAETESPGETTGGSAESEPPGEG

SEQ ID NO: 1145 - protein, 30 aa, Artificial Sequence
  Description of Artificial Sequence: Synthetic polypeptide
GSAAPTAGTTPSASPAPPTGGSSAAGSPST

SEQ ID NO: 1146 - protein, 6 aa, Artificial Sequence
  Description of Artificial Sequence: Synthetic peptide
SGGGGS

SEQ ID NO: 1147 - protein, 5 aa, Artificial Sequence
  Description of Artificial Sequence: Synthetic peptide
GGGGS

SEQ ID NO: 1148 - protein, 6 aa, Artificial Sequence
  Description of Artificial Sequence: Synthetic peptide
GGSGGS

SEQ ID NO: 1149 - protein, 4 aa, Artificial Sequence
  Description of Artificial Sequence: Synthetic peptide
EPEA

SEQ ID NO: 1150 - protein, 6 aa, Artificial Sequence
  Description of Artificial Sequence: Synthetic 6xHis tag
HHHHHH

SEQ ID NO: 1151 - protein, 8 aa, Artificial Sequence
  Description of Artificial Sequence: Synthetic 8xHis tag
HHHHHHHH

SEQ ID NO: 1152 - protein, 16 aa, Artificial Sequence
  Description of Artificial Sequence: Synthetic peptide
LSGRSDNHSPLGLAGS

SEQ ID NO: 1153 - protein, 264 aa, Artificial Sequence
  Description of Artificial Sequence: Synthetic polypeptide
ELVVTQEPSHTVSPGGTVTLTCRSSTGAVTSSNYANWVQQKPGQAPRGLIGGTIKRAPGTPARFSGSLLGGKAALTLSGVQPEDEAEYYCALWYPNLWVFGGGTKLTVLGATPPETGAETESPGETTGGSAESEPPGEGEVQLLESGGGIVQPGGSLKLSCAASGFTFNTYAMNWVRQAPGKGLEWVARIRSKYNNYATYYADSVKDRFTISRDDSKNTVYLQMNNLKTEDTAVYYCVRHENFGNSYVSWFAHWGQGTLVTVSS

SEQ ID NO: 1154 - protein, 264 aa, Artificial Sequence
  Description of Artificial Sequence: Synthetic polypeptide
ELVVTQEPSHTVSPGGTVTLTCRSSTGEVTTSNYANWVQQKPGQAPRGLIGGTIKRAPGTPARFSGSLLGGKAALTLSGVQPEDEAEYYCALWYPNLWVFGGGTKLTVLGATPPETGAETESPGETTGGSAESEPPGEGEVQLLESGGGIVQPGGSLKLSCAASGFTFNTYAMNWVRQAPGKGLEWVARIRSKYNNYATYYADSVKDRFTISRDDSKNTVYLQMNNLKTEDTAVYYCVRHENFGNSYVSWFAHWGQGTLVTVSS

SEQ ID NO: 1155 - protein, 23 aa, Artificial Sequence
  Description of Artificial Sequence: Synthetic peptide
MKKNIAFLLASMFVFSIATNAYA

SEQ ID NO: 1156 - protein, 4 aa, Artificial Sequence
  Description of Artificial Sequence: Synthetic peptide
DEVD

SEQ ID NO: 1157 - protein, 16 aa, Artificial Sequence
  Description of Artificial Sequence: Synthetic peptide
LAGRSDNHSPLGLAGS

SEQ ID NO: 1158 - protein, 16 aa, Artificial Sequence
  Description of Artificial Sequence: Synthetic peptide
LAGRSDNHVPLSLSMG

SEQ ID NO: 1159 - protein, 16 aa, Artificial Sequence
  Description of Artificial Sequence: Synthetic peptide
LAGRSDNHEPLELVAG

SEQ ID NO: 1160 - protein, 256 aa, Artificial Sequence
  Description of Artificial Sequence: Synthetic polypeptide
QSVLTQPPSASGTPGQRVTISCSGSSSNIGSNYVYWYQQLPGTAPKLLIYRNNQRPSGVPDRFSGSKSGTSASLAISGLRSEDEADYYCAAWDDSLSGLWVFGGGTKLTVLGATPPETGAETESPGETTGGSAESEPPGEGQVQLQQWGGGLVKPGGSLRLSCAASGFTFSSYSMNWVRQAPGKGLEWVSRINSDGSSTNYADSVKGRFTISRDNAKNTLYLQMNSLRAEDTAVYYCARELRWGNWGQGTLVTVSS

SEQ ID NO: 1161 - protein, 255 aa, Artificial Sequence
  Description of Artificial Sequence: Synthetic polypeptide
QAGLTQPPSASGTPGQRVTLSCSGSYSNIGTYYVYWYQQLPGTAPKLLIYSNDQRLSGVPDRFSGSKSGTSASLAISGLQSEDEAAYYCAAWDDSLNGWAFGGGTKLTVLGATPPETGAETESPGETTGGSAESEPPGEGQVQLQQWGGGLVKPGGSLRLSCAASGFTFSSYSMNWVRQAPGKGLEWVSRINSDGSSTNYADSVKGRFTISRDNAKNTLYLQMNSLRAEDTAVYYCARELRWGNWGQGTLVTVSS

SEQ ID NO: 1162 - protein, 255 aa, Artificial Sequence
  Description of Artificial Sequence: Synthetic polypeptide
QPGLTQPPSASGTPGQRVTLSCSGRSSNIGSYYVYWYQHLPGMAPKLLIYRNSRRPSGVPDRFSGSKSGTSASLVISGLQSDDEADYYCAAWDDSLKSWVFGGGTKLTVLGATPPETGAETESPGETTGGSAESEPPGEGQVQLQQWGGGLVKPGGSLRLSCAASGFTFSSYSMNWVRQAPGKGLEWVSRINSDGSSTNYADSVKGRFTISRDNAKNTLYLQMNSLRAEDTAVYYCARELRWGNWGQGTLVTVSS

SEQ ID NO: 1163 - protein, 255 aa, Artificial Sequence
  Description of Artificial Sequence: Synthetic polypeptide
QSVLTQPPSASGTPGQRVTISCSGSSSNIGTNYVYWYQQFPGTAPKLLIYSNNQRPSGVPDRFSGSKSGTSGSLAISGLQSEDEADYSCAAWDDSLNGWVFGGGTKLTVLGATPPETGAETESPGETTGGSAESEPPGEGQVQLVQWGGGLVKPGGSLRLSCAASGFTFSSYSMNWVRQAPGKGLEWVSRINSDGSSTNYADSVKGRFTISRDNAKNTLYLQMNSLRAEDTAVYYCARELRWGNWGQGTLVTVSS

SEQ ID NO: 1164 - protein, 255 aa, Artificial Sequence
  Description of Artificial Sequence: Synthetic polypeptide
QPGLTQPPSASGTPGQRVTISCSGSSSNIGSNYVYWYQQLPGTAPKLLIYRNNQRPSGVPDRLSGSKSGTSASLAISGLRSEDEADYYCAAWDDSLSGWVFGGGTKLTVLGATPPETGAETESPGETTGGSAESEPPGEGQVQLVQWGGGLVKPGGSLRLSCAASGFTFSSYSMNWVRQAPGKGLEWVSRINSDGSSTNYADSVKGRFTISRDNAKNTLYLQMNSLRAEDTAVYYCARELRWGNWGQGTLVTVSS

SEQ ID NO: 1165 - protein, 256 aa, Artificial Sequence
  Description of Artificial Sequence: Synthetic polypeptide
QAVLTQPPSASGTPGQRVTISCSGSSSNIGSYYVYWYQQVPGAAPKLLMRLNNQRPSGVPDRFSGAKSGTSASLVISGLRSEDEADYYCAAWDDSLSGQWVFGGGTKLTVLGATPPETGAETESPGETTGGSAESEPPGEGQVQLQQWGGGLVKPGGSLRLSCAASGFTFSSYSMNWVRQAPGKGLEWVSRINSDGSSTNYADSVKGRFTISRDNAKNTLYLQMNSLRAEDTAVYYCARELRWGNWGQGTLVTVSS

SEQ ID NO: 1166 - protein, 255 aa, Artificial Sequence
  Description of Artificial Sequence: Synthetic polypeptide
QAGLTQPPSASGTPGQRVTISCSGSSSNIGSNYVYWYQQLPGTAPKLLIYRNNQRPSGVPDRFSGSKSGTSASLAISGLRSEDEADYYCATWDASLSGWVFGGGTKLTVLGATPPETGAETESPGETTGGSAESEPPGEGEVQLVQWGGGLVKPGGSLRLSCAASGFTFSSYSMNWVRQAPGKGLEWVSRINSDGSSTNYADSVKGRFTISRDNAKNTLYLQMNSLRAEDTAVYYCARELRWGNWGQGTLVTVSS

SEQ ID NO: 1167 - DNA, 5235 bp, Artificial Sequence
  Description of Artificial Sequence: Synthetic polynucleotide
tccccagcaggcagcccgaccagcaccgaggagggtacgagcgagtcggctactccagagagcggtccgggtacctctacggaaccgtccgaaggtagcgctccaggcacgtctgaaagcgcgacgccggaaagcggtccaggcagcgagccggcgacctccggtagcgaaacgcctggtacctcggagtcagcgactccggaaagcggtccgggtagcgaacctgcaacgagcggtagcgagactccaggcactagcgaatccgcaactccggagtcgggtccgggcacctctacggagcctagcgagggctcagcaccaggtagccctgcaggttccccgacgtcaaccgaggaaggtacaagcgaaagcgccacccctgagtcgggccctggcagcgaaccggcaactagcggcagcgagactccgggtaccagcgagtctgctacgccagagagcggcccaggttcgccagcgggttcgccgactagcacggaggagggcagcccagcgggtagcccgaccagcactgaggagggtacgtccaccgaaccgagcgaaggtagcgcaccaggtacctccgagtctgccacccctgaatccggtccaggtaccagcgaatcagccaccccggagtcgggtccaggtacgagcgaatctgctaccccggaatccggcccaggcagcgaacctgctactagcggcagcgaaacgccgggcagcgaacctgccacgtcaggcagcgagacgccgggttcccctgcaggctccccgaccagcactgaggagggcacctccaccgaaccatcagaaggtagcgcgcctggtacgtcaaccgaaccttccgagggcagcgcaccgggtggctcagcgcctactacaggggaggcgggggaagcagcaggggcgacttctgctggggctaccggccccgctacctcaggctccgaaaccccgggcaccgatatccagatgacccagagcccttcttccctgtccgcatccgtcggcgatcgtgtcacgattacctgtcgcagcactaagagcctgctgcactcaaacggtatcacgtacctgtactggtaccagcagaagccgggcaaagcgccgaagctgctgatttatcagatgagcaacctggcatcgggcgtgccgagccgtttcagcagcagcggtagcggtaccgacttcacgctgaccatcagctcgttgcagccagaggactttgcgacgtactattgtgcgcaaaacttggaaattccgcgcaccttcggccagggtacgaaagttgagattaaaggtgccaccccaccggagactggtgcagaaaccgagtctccgggcgaaaccacgggcggtagcgcggagagcgaaccgcctggtgagggtcaagttcaattggttcagagcggtccgggtctggttcaaccgggcggcagcgtgcgcatttcttgtgcggccagcggttacacctttacgaactacggtatgaattgggtgaaacaagctccgggcaaaggtctggagtggatgggttggatcaatacctataccggtgaatccacttacgcggattcctttaagggccgtttcaccttcagcctggacacgagcgcgagcgctgcatatctgcaaatcaatagcctgcgtgccgaagataccgcggtgtactattgcgcgcgttttgcaatcaagggcgactattggggtcaaggcacgctgctgaccgtgagcagcggtggtggcggcagcgatatccaaatgacccaatccccatcctccctgtctgcaagcgttggtgatcgtgtgacgattacgtgccgtgcctcccaagatatccgtaactacctgaattggtatcagcagaaaccgggcaaggctccgaaattgctgatctactacaccagccgcctggagtcgggtgtgcctagccgcttcagcggcagcggttcgggtaccgactataccttgaccattagcagcctgcagccggaagatttcgcgacgtattactgccaacagggtaacacgctgccgtggacctttggccaaggtaccaaagtcgagattaagggtgcgaccccgccggaaaccggtgcggaaaccgagagcccgggtgaaacgactggcggctctgcagagagcgagccgccaggtgagggcgaagtccaactggtcgagtctggtggcggcctggtgcaaccgggtggcagcctgcgtctgagctgcgctgcgagcggctatagctttaccggttataccatgaactgggttcgccaggcaccgggtaagggtctggaatgggtggcgctgatcaatccgtacaaaggtgtgagcacttacaatcagaaattcaaagaccgtttcaccattagcgttgacaagagcaagaataccgcgtatctgcagatgaacagcttgcgcgccgaggatacggccgtttactactgtgcacgtagcggctattacggtgacagcgactggtactttgacgtctggggtcagggcacgctggtcaccgttagcagcggcaccgccgaagcagctagcgcctctggcacgactggtgaagccggagaggcagctggcgcgacctcagcgggggctactgggccttctccaggtagcccagctggtagcccaacctctaccgaagaaggtacctctgaatccgctactccagaatccggtcctggtactagcactgagccaagcgaaggttctgctccaggctccccggcaggtagccctacctctaccgaagagggcactagcaccgaaccatctgagggttccgctcctggcacctccactgaaccgtccgaaggcagtgctccgggtacttccgaaagcgcaactccggaatccggccctggttctgagcctgctacttccggctctgaaactccaggtagcgagccagcgacttctggttctgaaactccaggttcaccggcgggtagcccgacgagcacggaggaaggtacctctgagtcggccactcctgagtccggtccgggcacgagcaccgagccgagcgagggttcagccccgggtaccagcacggagccgtccgagggtagcgcaccgggttctccggcgggctcccctacgtctacggaagagggtacgtccactgaacctagcgagggcagcgcgccaggcaccagcactgaaccgagcgaaggcagcgcacctggcactagcgagtctgcgactccggagagcggtccgggtacgagcacggaaccaagcgaaggcagcgccccaggtacctctgaatctgctaccccagaatctggcccgggttccgagccagctacctctggttctgaaaccccaggtacttccactgaaccaagcgaaggtagcgctcctggcacttctactgaaccatccgaaggttccgctcctggtacgtctgaaagcgctacccctgaaagcggcccaggcacctctgaaagcgctactcctgagagcggtccaggctctccagcaggttctccaacctccactgaagaaggcacctctgagtctgctacccctgaatctggtcctggctccgaacctgctacctctggttccgaaactccaggtacctcggaatctgcgactccggaatctggcccgggcacgagcacggagccgtctgagggtagcgcaccaggtaccagcactgagccttctgagggctctgcaccgggtacctccacggaaccttcggaaggttctgcgccgggtacctccactgagccatccgagggttcagcaccaggtactagcacggaaccgtccgagggctctgcaccaggtacgagcaccgaaccgtcggagggtagcgctccaggtagcccagcgggctctccgacaagcaccgaagaaggcaccagcaccgagccgtccgaaggttccgcaccaggtacaagcgagagcgcgactcctgaatctggtccgggtagcgagcctgcaaccagcggttctgagacgccgggcacttccgaatctgcgaccccggagtccggtccaggttcagagccggcgacgagcggttcggaaacgccgggtacgtctgaatcagccacgccggagtctggtccgggtacctcgaccgaaccaagcgaaggttcggcaccgggtactagcgagagcgcaacccctgaaagcggtccgggcagcccggcaggttctccaaccagcaccgaagaaggttcccctgctggtagcccgacctctacggaggaaggtagccctgcaggttccccaacttctactgaggaaggtacttctgagtccgctaccccagaaagcggtcctggtacctccactgaaccgtctgaaggctctgcaccaggcacttctgagtctgctactccagaaagcggcccaggttctgaaccagcaacttctggctctgagactccaggcacttctgagtccgcaacgcctgaatccggtcctggttctgaaccagctacttccggcagcgaaaccccaggtacctctgagtctgcgactccagagtctggtcctggtacttccactgagcctagcgagggttccgcaccaggttctccggctggtagcccgaccagcacggaggagggtacgtctgaatctgcaacgccggaatcgggcccaggttcggagcctgcaacgtctggcagcgaaaccccgggtacctccgaatctgctacaccggaaagcggtcctggcagccctgctggttctccaacctctaccgaggagggttcaccggcaggtagcccgactagcactgaagaaggtactagcacggagccgagcgagggtagtgctccgggtacgagcgagagcgcaacgccagagagcggtccaggcaccagcgaatcggccacccctgagagcggcccaggtacttctgagagcgccactcctgaatccggccctggtagcgagccggcaacctccggctcagaaactcctggttcggaaccagcgaccagcggttctgaaactccgggtagcccggcaggcagcccaacgagcaccgaagagggtaccagcacggaaccgagcgagggttctgccccgggtacttccaccgaaccatcggagggctctgcacctggtagcgaacctgcgacgtctggttctgaaacgccgggtaccagcgaaagcgctaccccagaatccggtccgggcactagcaccgagccatcggagggctccgcaccaggtcaccatcatcaccatcac

1-127. (canceled)

128. A polypeptide comprising an antigen binding fragment, wherein the antigen binding fragment comprises light chain complementarity-determining regions (CDR-L) and heavy chain complementarity-determining regions (CDR-H), and wherein the antigen binding fragment:
a. specifically binds to cluster of differentiation 3 T cell receptor (CD3); and
b. comprises CDR-H1, CDR-H2, and CDR-H3, wherein the CDR-H3 comprises an amino acid sequence of SEQ ID NO:10.

129. The polypeptide of claim 128, wherein the CDR-H1 comprises an amino acid sequence of SEQ ID NO: 8; and wherein the CDR-H2 comprises an amino acid sequence of SEQ ID NO: 9.

130. The polypeptide of claim 128, wherein the antigen binding fragment exhibits a higher thermal stability, as evidenced by in an in vitro assay,
(i) a higher melting temperature (Tₘ) relative to that of an antigen binding fragment consisting of a sequence shown in SEQ ID NO:41, or
(ii) upon incorporating said anti-CD3 antigen binding fragment into an anti-CD3 bispecific antibody, the bispecific antibody exhibits a higher Tm relative to a control bispecific antibody, wherein said anti-CD3 bispecific antibody comprises said anti-CD3 binding fragment and a reference antigen binding fragment that binds to an antigen other than CD3, and wherein said control bispecific antigen binding fragment consists of SEQ ID NO:41 and said reference antigen binding fragment.

131. The polypeptide of claim 130, wherein the Tₘ of the antigen binding fragment is at least 2° C. greater than the Tₘ of an antigen binding fragment consisting of a sequence of SEQ ID NO:41.

132. The polypeptide of claim 130, wherein the CDR-H1 comprises an amino acid sequence of SEQ ID NO: 8; and wherein the CDR-H2 comprises an amino acid sequence of SEQ ID NO: 9.

133. The polypeptide of claim 128, wherein the antigen binding fragment comprises FR-H1, FR-H2, FR-H3, FR-H4, each exhibiting at least 86% sequence identity to an amino acid of SEQ ID NOs: 22, 23, 25, and 26, respectively.

134. The polypeptide of claim 128, wherein the antigen binding fragment comprises FR-L1, FR-L2, FR-L3, FR-L4, each exhibiting at least 86% sequence identity to amino acid sequences of SEQ ID NOs: 12, 13, 18, and 19, respectively.

135. The polypeptide of claim 128, wherein the CDR-L comprises:
a. a CDR-L1 having an amino acid sequence of SEQ ID NOs: 1 or 2,
b. a CDR-L2 having an amino acid sequence of SEQ ID NOs: 4 or 5, and
c. a CDR-L3 having an amino acid sequence of SEQ ID NO:6.

136. The polypeptide of claim 128, wherein the CDR-L comprises:
a. a CDR-L1 having an amino acid sequence of SEQ ID NO:1;
b. a CDR-L2 having an amino acid sequence of any one of SEQ ID NOs: 4 or 5; and
c. a CDR-L3 having an amino acid sequence of SEQ ID NOs: 6 or 7.

137. The polypeptide of claim 128, wherein the CDR-L comprises:
a. a CDR-L1 having an amino acid sequence of SEQ ID NO:2;
b. a CDR-L2 having an amino acid sequence of any one of SEQ ID NOs: 4 or 5; and
c. a CDR-L3 having an amino acid sequence of SEQ ID NO:6.

138. The polypeptide of claim 128, wherein the CDR-L comprises:
a. a CDR-L1 having an amino acid sequence of SEQ ID NO: 1;
b. a CDR-L2 having an amino acid sequence of SEQ ID NO: 4; and
c. a CDR-L3 having an amino acid sequence of SEQ ID NO: 6.

139. The polypeptide of claim 128, wherein the CDR-L comprises:
a. a CDR-L1 having an amino acid sequence of SEQ ID NO:2;
b. a CDR-L2 having an amino acid sequence of SEQ ID NO:5; and
c. a CDR-L3 having an amino acid sequence of SEQ ID NO:6.

140. The polypeptide of claim 128, wherein the antigen binding fragment further comprises a light chain framework region (FR-L) and a heavy chain framework region (FR-H), and wherein the antigen binding fragment comprises:
a. a FR-L1 having an amino acid sequence of SEQ ID NO:12;
b. a FR-L2 having an amino acid sequence of SEQ ID NO:13;
c. a FR-L3 having an amino acid sequence of any one of SEQ ID NOs:14-17;
d. a FR-L4 having an amino acid sequence of SEQ ID NO:19;
e. a FR-H1 having an amino acid sequence of SEQ ID NO:20 or SEQ ID NO:21;
f. a FR-H2 having an amino acid sequence of SEQ ID NO:23;
g. a FR-H3 having an amino acid sequence of SEQ ID NO:24; and
h. a FR-H4 having an amino acid sequence of SEQ ID NO:26.

141. The polypeptide of claim 128, wherein the antigen binding fragment further comprises a light chain framework region (FR-L) and a heavy chain framework region (FR-H), and wherein the antigen binding fragment comprises:
a. a FR-L1 having an amino acid sequence of SEQ ID NO:12;
b. a FR-L2 having an amino acid sequence of SEQ ID NO:13;
c. a FR-L3 having an amino acid sequence of SEQ ID NO:14;
d. a FR-L4 having an amino acid sequence of SEQ ID NO:19;
e. a FR-H1 having an amino acid sequence of SEQ ID NO:20;
f. a FR-H2 having an amino acid sequence of SEQ ID NO:23;
g. a FR-H3 having an amino acid sequence of SEQ ID NO:24; and
h. a FR-H4 having an amino acid sequence of SEQ ID NO:26.

142. The polypeptide of claim 128, wherein the antigen binding fragment further comprises a light chain framework region (FR-L) and a heavy chain framework region (FR-H), and wherein the antigen binding fragment comprises:
a. a FR-L1 having an amino acid sequence of SEQ ID NO:12;
b. a FR-L2 having an amino acid sequence of SEQ ID NO:13;
c. a FR-L3 having an amino acid sequence of SEQ ID NO:15;
d. a FR-L4 having an amino acid sequence of SEQ ID NO:19;
e. a FR-H1 having an amino acid sequence of SEQ ID NO:21;
f. a FR-H2 having an amino acid sequence of SEQ ID NO:23;
g. a FR-H3 having an amino acid sequence of SEQ ID NO:24; and
h. a FR-H4 having an amino acid sequence of SEQ ID NO:26.

143. The polypeptide of claim 128, wherein the antigen binding fragment further comprises a light chain framework region (FR-L) and a heavy chain framework region (FR-H), and wherein the antigen binding fragment comprises:
a. a FR-L1 having an amino acid sequence of SEQ ID NO:12;
b. a FR-L2 having an amino acid sequence of SEQ ID NO:13;
c. a FR-L3 having an amino acid sequence of SEQ ID NO:16;
d. a FR-L4 having an amino acid sequence of SEQ ID NO:19;
e. a FR-H1 having an amino acid sequence of SEQ ID NO:21;
f. a FR-H2 having an amino acid sequence of SEQ ID NO:23;
g. a FR-H3 having an amino acid sequence of SEQ ID NO:24; and
h. a FR-H4 having an amino acid sequence of SEQ ID NO:26.

144. The polypeptide of claim 128, wherein the antigen binding fragment further comprises a light chain framework region (FR-L) and a heavy chain framework region (FR-H), and wherein the antigen binding fragment comprises:
a. a FR-L1 having an amino acid sequence of SEQ ID NO:12;
b. a FR-L2 having an amino acid sequence of SEQ ID NO:13;
c. a FR-L3 having an amino acid sequence of SEQ ID NO:17;
d. a FR-L4 having an amino acid sequence of SEQ ID NO:19;
e. a FR-H1 having an amino acid sequence of SEQ ID NO:21;
f. a FR-H2 having an amino acid sequence of SEQ ID NO:23;
g. a FR-H3 having an amino acid sequence of SEQ ID NO:24; and
h. a FR-H4 having an amino acid sequence of SEQ ID NO:26.

145. The polypeptide of claim 128, wherein the antigen binding fragment comprises a variable heavy (VH) amino acid sequence having at least 90% sequence identity to an amino acid sequence of SEQ ID NO:28 or SEQ ID NO:31.

146. The polypeptide of claim 128, wherein the antigen binding fragment comprises a variable light (VL) amino acid sequence having at least 90% sequence identity to an amino acid sequence of any one of SEQ ID NOs: 27, 29, 30, 32, or 33.

147. The polypeptide of claim 128, wherein the antigen binding fragment comprises an amino acid sequence having at least 95% sequence identity to an amino acid sequence of any one of SEQ ID NOs:36-40.

148. The polypeptide of claim 128, wherein the antigen binding fragment specifically binds human or cynomolgus monkey (cyno) CD3.

149. The polypeptide of claim 128, wherein the antigen binding fragment specifically binds human and cynomolgus monkey (cyno) CD3.

150. The polypeptide of claim 128, wherein the antigen binding fragment binds a CD3 complex subunit selected from CD3 epsilon, CD3 delta, CD3 gamma, CD3 zeta, CD3 alpha and CD3 beta epsilon unit of CD3.

151. The polypeptide of claim 128, wherein the antigen binding fragment binds a CD3 epsilon fragment of CD3.

152. The polypeptide of claim 128, wherein the antigen binding fragment exhibits an isoelectric point (p1) that is less than or equal to 6.6.

153. The polypeptide of claim 128, wherein the antigen binding fragment exhibits a p1 that is between 6.0 and 6.6, inclusive.

154. The polypeptide of claim 128, wherein the antigen binding fragment exhibits a p1 that is at least 0.1 pH units lower than the p1 of a reference antigen binding fragment consisting of a sequence shown in SEQ ID NO: 41.

155. The polypeptide of claim 128, wherein the antigen binding fragment specifically binds human or cyno CD3 with a dissociation constant (K_{d}) constant between about between about 10 nM and about 400 nM, as determined in an in vitro antigen-binding assay comprising a human or cyno CD3 antigen.

156. The polypeptide of claim 128, wherein the antigen binding fragment specifically binds human or cyno CD3 with a dissociation constant (K_{d}) of less than about 10 nM as determined in an in vitro antigen-binding assay.

157. The polypeptide of claim 128, wherein the antigen binding fragment exhibits a binding affinity to CD3 that is at least 2-fold weaker relative to that of an antigen binding fragment consisting of an amino acid sequence of SEQ ID NO:41, as determined by the respective dissociation constants (K_{d}) in an in vitro antigen-binding assay.

158. A pharmaceutical composition comprising the polypeptide of claim 128 and one or more pharmaceutically suitable excipients.

159. A method of treating a disease in a subject, comprising administering to the subject in need thereof one or more therapeutically effective doses of the pharmaceutical composition of claim 158.

160. An isolated nucleic acid, the nucleic acid comprising (a) a polynucleotide encoding a polypeptide of claim 128; or (b) the complement of the polynucleotide of (a).
